(19) United States
(12) Patent Application Publication
(10) Pub. No.: US 2003/0181692 A1
(43) Pub. Date: Sep. 25, 2003

(54) 207 human secreted proteins

(76) Inventors: Jian Ni, Germantown, MD (US); Reinhard Ebner, Gaithersburg, MD (US); David W. LaFleur, Washington, DC (US); Paul A. Moore, Germantown, MD (US); Henrik S. Olsen, Gaithersburg, MD (US); Craig A. Rosen, Laytonsville, MD (US); Steven M. Ruben, Olney, MD (US); Daniel R. Soppet, Centreville, VA (US); Paul E. Young, Gaithersburg, MD (US); Yanggu Shi, Gaithersburg, MD (US); Kimberly A. Florence, Rockville, MD (US); Ying-Fei Wei, Berkeley, CA (US); Charles Florence, Rockville, MD (US); Jing-Shan Hu, Mountain View, CA (US); Yi Li, Sunnyvale, CA (US); Hla Kyaw, Frederick, MD (US); Carrie L. Fischer, Burke, VA (US); Ann M. Ferrie, Painted Post, NY (US); Ping Fan, Potomac, MD (US); Ping Feng, Gaithersburg, MD (US); Gregory A. Endress, Florence, MA (US); Patrick J. Dillon, Carlsbad, CA (US); Kenneth C. Carter, North Potomac, MD (US); Laurie A. Brewer, St. Paul, MN (US); Guo-Liang Yu, Berkeley, CA (US); Zhizhen Zeng, Lansdale, PA (US); John M. Greene, Gaithersburg, MD (US)

Correspondence Address: HUMAN GENOME SCIENCES INC, 9410 KEY WEST AVENUE, ROCKVILLE, MD, 20850

(21) Appl. No.: 09/933,767

(22) Filed: Aug. 22, 2001

Related U.S. Application Data
(63) Continuation-in-part of application No. PCT/US01/05614, filed on Feb. 21, 2001.
(63) Continuation-in-part of application No. 09/205,258, filed on Dec. 4, 1998.
(60) Provisional application No. 60/184,836, filed on Feb. 24, 2000.
(60) Provisional application No. 60/193,170, filed on Mar. 29, 2000.
(60) Provisional application No. 60/048,885, filed on Jun. 6, 1997.
(60) Provisional application No. 60/049,375, filed on Jun. 6, 1997.
(60) Provisional application No. 60/048,881, filed on Jun. 6, 1997.
(60) Provisional application No. 60/048,880, filed on Jun. 6, 1997.
(60) Provisional application No. 60/048,896, filed on Jun. 6, 1997.
(60) Provisional application No. 60/049,020, filed on Jun. 6, 1997.
(60) Provisional application No. 60/048,876, filed on Jun. 6, 1997.
(60) Provisional application No. 60/048,895, filed on Jun. 6, 1997.
(60) Provisional application No. 60/048,884, filed on Jun. 6, 1997.
(60) Provisional application No. 60/048,894, filed on Jun. 6, 1997.
(60) Provisional application No. 60/048,971, filed on Jun. 6, 1997.
(60) Provisional application No. 60/048,964, filed on Jun. 6, 1997.
(60) Provisional application No. 60/048,882, filed on Jun. 6, 1997.
(60) Provisional application No. 60/048,899, filed on Jun. 6, 1997.
(60) Provisional application No. 60/048,893, filed on Jun. 6, 1997.
(60) Provisional application No. 60/048,900, filed on Jun. 6, 1997.
(60) Provisional application No. 60/048,901, filed on Jun. 6, 1997.
(60) Provisional application No. 60/048,892, filed on Jun. 6, 1997.
(60) Provisional application No. 60/048,915, filed on Jun. 6, 1997.
(60) Provisional application No. 60/049,019, filed on Jun. 6, 1997.
(60) Provisional application No. 60/048,970, filed on Jun. 6, 1997.
(60) Provisional application No. 60/048,972, filed on Jun. 6, 1997.
(60) Provisional application No. 60/048,916, filed on Jun. 6, 1997.
(60) Provisional application No. 60/049,373, filed on Jun. 6, 1997.
(60) Provisional application No. 60/048,875, filed on Jun. 6, 1997.
(60) Provisional application No. 60/049,374, filed on Jun. 6, 1997.
(60) Provisional application No. 60/048,917, filed on Jun. 6, 1997.
(60) Provisional application No. 60/048,949, filed on Jun. 6, 1997.
(60) Provisional application No. 60/048,974, filed on Jun. 6, 1997.
(60) Provisional application No. 60/048,883, filed on Jun. 6, 1997.
(60) Provisional application No. 60/048,897, filed on Jun. 6, 1997.
(60) Provisional application No. 60/048,898, filed on Jun. 6, 1997.
(60) Provisional application No. 60/048,962, filed on Jun. 6, 1997.
(60) Provisional application No. 60/048,963, filed on Jun. 6, 1997.
(60) Provisional application No. 60/048,877, filed on Jun. 6, 1997.
(60) Provisional application No. 60/048,878, filed on Jun. 6, 1997.
(60) Provisional application No. 60/057,645, filed on Sep. 5, 1997.
(60) Provisional application No. 60/057,642, filed on Sep. 5, 1997.
(60) Provisional application No. 60/057,668, filed on Sep. 5, 1997.
(60) Provisional application No. 60/057,635, filed on Sep. 5, 1997.
(60) Provisional application No. 60/057,627, filed on Sep. 5, 1997.
(60) Provisional application No. 60/057,667, filed on Sep. 5, 1997.
(60) Provisional application No. 60/057,666, filed on Sep. 5, 1997.
(60) Provisional application No. 60/057,764, filed on Sep. 5, 1997.
(60) Provisional application No. 60/057,643, filed on Sep. 5, 1997.
(60) Provisional application No. 60/057,769, filed on Sep. 5, 1997.
(60) Provisional application No. 60/057,763, filed on Sep. 5, 1997.
(60) Provisional application No. 60/057,650, filed on Sep. 5, 1997.
(60) Provisional application No. 60/057,584, filed on Sep. 5, 1997.
(60) Provisional application No. 60/057,647, filed on Sep. 5, 1997.
(60) Provisional application No. 60/057,661, filed on Sep. 5, 1997.
(60) Provisional application No. 60/057,662, filed on Sep. 5, 1997.
(60) Provisional application No. 60/057,646, filed on Sep. 5, 1997.
(60) Provisional application No. 60/057,654, filed on Sep. 5, 1997.
(60) Provisional application No. 60/057,651, filed on Sep. 5, 1997.
(60) Provisional application No. 60/057,644, filed on Sep. 5, 1997.
(60) Provisional application No. 60/057,765, filed on Sep. 5, 1997.
(60) Provisional application No. 60/057,762, filed on Sep. 5, 1997.
(60) Provisional application No. 60/057,775, filed on Sep. 5, 1997.
(60) Provisional application No. 60/057,648, filed on Sep. 5, 1997.
(60) Provisional application No. 60/057,774, filed on Sep. 5, 1997.
(60) Provisional application No. 60/057,649, filed on Sep. 5, 1997.
(60) Provisional application No. 60/057,770, filed on Sep. 5, 1997.
(60) Provisional application No. 60/057,771, filed on Sep. 5, 1997.
(60) Provisional application No. 60/057,761, filed on Sep. 5, 1997.
(60) Provisional application No. 60/057,760, filed on Sep. 5, 1997.
(60) Provisional application No. 60/057,776, filed on Sep. 5, 1997.
(60) Provisional application No. 60/057,778, filed on Sep. 5, 1997.
(60) Provisional application No. 60/057,629, filed on Sep. 5, 1997.
(60) Provisional application No. 60/057,628, filed on Sep. 5, 1997.
(60) Provisional application No. 60/057,777, filed on Sep. 5, 1997.
(60) Provisional application No. 60/057,634, filed on Sep. 5, 1997.
(60) Provisional application No. 60/070,923, filed on Dec. 18, 1997.
(60) Provisional application No. 60/092,921, filed on Jul. 15, 1998.
(60) Provisional application No. 60/094,657, filed on Jul. 30, 1998.
(60) Provisional application No. 60/070,923, filed on Dec. 18, 1997.
(60) Provisional application No. 60/092,921, filed on Jul. 15, 1998.
(60) Provisional application No. 60/094,657, filed on Jul. 30, 1998.

(51) Int. Cl. C07H 21/04; C12N 9/00; C12P 21/02; C12N 5/06; C07K 14/435

(52) U.S. Cl. 536/23.1; 530/350; 435/325; 435/183; 435/69.1; 435/320.1

(57) ABSTRACT

The present invention relates to novel human secreted proteins and isolated nucleic acids containing the coding regions of the genes encoding such proteins. Also provided are vectors, host cells, antibodies, and recombinant methods for producing human secreted proteins. The invention further relates to diagnostic and therapeutic methods useful for diagnosing and treating diseases, disorders, and/or conditions related to these novel human secreted proteins.

[0001] This application is a continuation-in-part of, and claims benefit under 35 U.S.C. §120 of copending International patent application Serial No: PCT/US01/05614 (in English), filed Feb. 21, 2001, which is hereby incorporated by reference, which claims benefit under 35 U.S.C. §119(e) based on U.S. Provisional Patent Application Serial No. 60/184,836 filed Feb. 24, 2000 and 60/193,170 filed Mar. 29, 2000, both of which are hereby incorporated by reference, and this application is a continuation-in-part of, and claims benefit under 35 U.S.C. §120 of copending U.S. patent application Ser. No. 09/205,258 filed Dec. 4, 1998, which is hereby incorporated by reference, and which claims benefit under 35 U.S.C. §120 of International patent application No.: PCT/US98/11422 (in English), filed Jun. 4, 1998, which is hereby incorporated by reference, which claims benefit under 35 U.S.C. §119(e) based on U.S. Provisional Applications, all of which are hereby incorporated by reference:

| | Filing Date | Appln No. |
|---|---|---|
| 1. | 06 Jun 1997 | 60/048,885 |
| 2. | 06 Jun 1997 | 60/049,375 |
| 3. | 06 Jun 1997 | 60/048,881 |
| 4. | 06 Jun 1997 | 60/048,880 |
| 5. | 06 Jun 1997 | 60/048,896 |
| 6. | 06 Jun 1997 | 60/049,020 |
| 7. | 06 Jun 1997 | 60/048,876 |
| 8. | 06 Jun 1997 | 60/048,895 |
| 9. | 06 Jun 1997 | 60/048,884 |
| 10. | 06 Jun 1997 | 60/048,894 |
| 11. | 06 Jun 1997 | 60/048,971 |
| 12. | 06 Jun 1997 | 60/048,964 |
| 13. | 06 Jun 1997 | 60/048,882 |
| 14. | 06 Jun 1997 | 60/048,899 |
| 15. | 06 Jun 1997 | 60/048,893 |
| 16. | 06 Jun 1997 | 60/048,900 |
| 17. | 06 Jun 1997 | 60/048,901 |
| 18. | 06 Jun 1997 | 60/048,892 |
| 19. | 06 Jun 1997 | 60/048,915 |
| 20. | 06 Jun 1997 | 60/049,019 |
| 21. | 06 Jun 1997 | 60/048,970 |
| 22. | 06 Jun 1997 | 60/048,972 |
| 23. | 06 Jun 1997 | 60/048,916 |
| 24. | 06 Jun 1997 | 60/049,373 |
| 25. | 06 Jun 1997 | 60/048,875 |
| 26. | 06 Jun 1997 | 60/049,374 |
| 27. | 06 Jun 1997 | 60/048,917 |
| 28. | 06 Jun 1997 | 60/048,949 |
| 29. | 06 Jun 1997 | 60/048,974 |
| 30. | 06 Jun 1997 | 60/048,883 |
| 31. | 06 Jun 1997 | 60/048,897 |
| 32. | 06 Jun 1997 | 60/048,898 |
| 33. | 06 Jun 1997 | 60/048,962 |
| 34. | 06 Jun 1997 | 60/048,963 |
| 35. | 06 Jun 1997 | 60/048,877 |
| 36. | 06 Jun 1997 | 60/048,878 |
| 37. | 05 Sep 1997 | 60/057,645 |
| 38. | 05 Sep 1997 | 60/057,642 |
| 39. | 05 Sep 1997 | 60/057,668 |
| 40. | 05 Sep 1997 | 60/057,635 |
| 41. | 05 Sep 1997 | 60/057,627 |
| 42. | 05 Sep 1997 | 60/057,667 |
| 43. | 05 Sep 1997 | 60/057,666 |
| 44. | 05 Sep 1997 | 60/057,764 |
| 45. | 05 Sep 1997 | 60/057,643 |
| 46. | 05 Sep 1997 | 60/057,769 |
| 47. | 05 Sep 1997 | 60/057,763 |
| 48. | 05 Sep 1997 | 60/057,650 |
| 49. | 05 Sep 1997 | 60/057,584 |
| 50. | 05 Sep 1997 | 60/057,647 |
| 51. | 05 Sep 1997 | 60/057,661 |
| 52. | 05 Sep 1997 | 60/057,662 |
| 53. | 05 Sep 1997 | 60/057,646 |
| 54. | 05 Sep 1997 | 60/057,654 |
| 55. | 05 Sep 1997 | 60/057,651 |
| 56. | 05 Sep 1997 | 60/057,644 |
| 57. | 05 Sep 1997 | 60/057,765 |
| 58. | 05 Sep 1997 | 60/057,762 |
| 59. | 05 Sep 1997 | 60/057,775 |
| 60. | 05 Sep 1997 | 60/057,648 |
| 61. | 05 Sep 1997 | 60/057,774 |
| 62. | 05 Sep 1997 | 60/057,649 |
| 63. | 05 Sep 1997 | 60/057,770 |
| 64. | 05 Sep 1997 | 60/057,771 |
| 65. | 05 Sep 1997 | 60/057,761 |
| 66. | 05 Sep 1997 | 60/057,760 |
| 67. | 05 Sep 1997 | 60/057,776 |
| 68. | 05 Sep 1997 | 60/057,778 |
| 69. | 05 Sep 1997 | 60/051,629 |
| 70. | 05 Sep 1997 | 60/057,628 |
| 71. | 05 Sep 1997 | 60/057,777 |
| 72. | 05 Sep 1997 | 60/057,634 |
| 73. | 18 Dec 1997 | 60/070,923 |
| 74. | 15 Jul 1998 | 60/092,921 |
| 75. | 30 Jul 1998 | 60/094,657 |
| 76. | 18 Dec 1997 | 60/070,923 |
| 77. | 15 Jul 1998 | 60/092,921 |
| 78. | 30 Jul 1998 | 60/094,657 |

### FIELD OF THE INVENTION

[0002] This invention relates to newly identified polynucleotides, polypeptides encoded by these polynucleotides, antibodies that bind these polypeptides, uses of such polynucleotides, polypeptides, and antibodies, and their production.

### BACKGROUND OF THE INVENTION

[0003] Unlike bacterium, which exist as a single compartment surrounded by a membrane, human cells and other eucaryotes are subdivided by membranes into many functionally distinct compartments. Each membrane-bounded compartment, or organelle, contains different proteins essential for the function of the organelle. The cell uses “sorting signals,” which are amino acid motifs located within the protein, to target proteins to particular cellular organelles.

[0004] One type of sorting signal, called a signal sequence, a signal peptide, or a leader sequence, directs a class of proteins to an organelle called the endoplasmic reticulum (ER). The ER separates the membrane-bounded proteins from all other types of proteins. Once localized to the ER, both groups of proteins can be further directed to another organelle called the Golgi apparatus. Here, the Golgi distributes the proteins to vesicles, including secretory vesicles, the cell membrane, lysosomes, and the other organelles.

[0005] Proteins targeted to the ER by a signal sequence can be released into the extracellular space as a secreted protein. For example, vesicles containing secreted proteins can fuse with the cell membrane and release their contents into the extracellular space—a process called exocytosis. Exocytosis can occur constitutively or after receipt of a triggering signal. In the latter case, the proteins are stored in secretory vesicles (or secretory granules) until exocytosis is triggered. Similarly, proteins residing on the cell membrane can also be secreted into the extracellular space by proteolytic cleavage of a “linker” holding the protein to the membrane.

[0006] Despite the great progress made in recent years, only a small number of genes encoding human secreted proteins have been identified. These secreted proteins include the commercially valuable human insulin, interferon, Factor VIII, human growth hormone, tissue plasminogen activator, and erythropoeitin. Thus, in light of the pervasive role of secreted proteins in human physiology, a need exists for identifying and characterizing novel human secreted proteins and the genes that encode them. This knowledge will allow one to detect, to treat, and to prevent medical diseases, disorders, and/or conditions by using secreted proteins or the genes that encode them.

### SUMMARY OF THE INVENTION

[0007] The present invention relates to novel polynucleotides and the encoded polypeptides. Moreover, the present invention relates to vectors, host cells, antibodies, and recombinant and synthetic methods for producing the polypeptides and polynucleotides. Also provided are diagnostic methods for detecting diseases, disorders, and/or conditions related to the polypeptides and polynucleotides, and therapeutic methods for treating such diseases, disorders, and/or conditions. The invention further relates to screening methods for identifying binding partners of the polypeptides.

### DETAILED DESCRIPTION

[0008] Definitions

[0009] The following definitions are provided to facilitate understanding of certain terms used throughout this specification.

[0010] In the present invention, “isolated” refers to material removed from its original environment (e.g., the natural environment if it is naturally occurring), and thus is altered “by the hand of man” from its natural state. For example, an isolated polynucleotide could be part of a vector or a composition of matter, or could be contained within a cell, and still be “isolated” because that vector, composition of matter, or particular cell is not the original environment of the polynucleotide. The term “isolated” does not refer to genomic or cDNA libraries, whole cell total or mRNA preparations, genomic DNA preparations (including those separated by electrophoresis and transferred onto blots), sheared whole cell genomic DNA preparations or other compositions where the art demonstrates no distinguishing features of the polynucleotide/sequences of the present invention.

[0011] In the present invention, a “secreted” protein refers to those proteins capable of being directed to the ER, secretory vesicles, or the extracellular space as a result of a signal sequence, as well as those proteins released into the extracellular space without necessarily containing a signal sequence. If the secreted protein is released into the extracellular space, the secreted protein can undergo extracellular processing to produce a “mature” protein. Release into the extracellular space can occur by many mechanisms, including exocytosis and proteolytic cleavage.

[0012] In specific embodiments, the polynucleotides of the invention are at least 15, at least 30, at least 50, at least 100, at least 125, at least 500, or at least 1000 continuous nucleotides but are less than or equal to 300 kb, 200 kb, 100 kb, 50 kb, 15 kb, 10 kb, 7.5 kb, 5 kb, 2.5 kb, 2.0 kb, or 1 kb, in length. In a further embodiment, polynucleotides of the invention comprise a portion of the coding sequences, as disclosed herein, but do not comprise all or a portion of any intron. In another embodiment, the polynucleotides comprising coding sequences do not contain coding sequences of a genomic flanking gene (i.e., 5′ or 3′ to the gene of interest in the genome). In other embodiments, the polynucleotides of the invention do not contain the coding sequence of more than 1000, 500, 250, 100, 50, 25, 20, 15, 10, 5, 4, 3, 2, or 1 genomic flanking gene(s).

[0013] As used herein, a “polynucleotide” refers to a molecule having a nucleic acid sequence contained in SEQ ID NO:X or the cDNA contained within the clone deposited with the ATCC. For example, the polynucleotide can contain the nucleotide sequence of the full length cDNA sequence, including the 5′ and 3′ untranslated sequences, the coding region, with or without the signal sequence, the secreted protein coding region, as well as fragments, epitopes, domains, and variants of the nucleic acid sequence. Moreover, as used herein, a “polypeptide” refers to a molecule having the translated amino acid sequence generated from the polynucleotide as broadly defined.

[0014] In the present invention, the full length sequence identified as SEQ ID NO:X was often generated by overlapping sequences contained in multiple clones (contig analysis). A representative clone containing all or most of the sequence for SEQ ID NO:X was deposited with the American Type Culture Collection (“ATCC”). As shown in Table 1, each clone is identified by a cDNA Clone ID (Identifier) and the ATCC Deposit Number. The ATCC is located at 10801 University Boulevard, Manassas, Va. 20110-2209, USA. The ATCC deposit was made pursuant to the terms of the Budapest Treaty on the international recognition of the deposit of microorganisms for purposes of patent procedure.

[0015] A “polynucleotide” of the present invention also includes those polynucleotides capable of hybridizing, under stringent hybridization conditions, to sequences contained in SEQ ID NO:X, the complement thereof, or the cDNA within the clone deposited with the ATCC. “Stringent hybridization conditions” refers to an overnight incubation at 42 degree C. in a solution comprising 50% formamide, 5×SSC (750 mM NaCl, 75 mM trisodium citrate), 50 mM sodium phosphate (pH 7.6), 5× Denhardt's solution, 10% dextran sulfate, and 20 μg/ml denatured, sheared salmon sperm DNA, followed by washing the filters in 0.1×SSC at about 65 degree C.

[0016] Also contemplated are nucleic acid molecules that hybridize to the polynucleotides of the present invention at lower stringency hybridization conditions. Changes in the stringency of hybridization and signal detection are primarily accomplished through the manipulation of formamide concentration (lower percentages of formamide result in lowered stringency); salt conditions, or temperature. For example, lower stringency conditions include an overnight incubation at 37 degree C. in a solution comprising 6×SSPE (20×SSPE=3M NaCl; 0.2M NaH₂PO₄; 0.02M EDTA, pH 7.4), 0.5% SDS, 30% formamide, 100 ug/ml salmon sperm blocking DNA; followed by washes at 50 degree C. with 1×SSPE, 0.1% SDS. In addition, to achieve even lower stringency, washes performed following stringent hybridization can be done at higher salt concentrations (e.g. 5×SSC).

[0017] Note that variations in the above conditions may be accomplished through the inclusion and/or substitution of alternate blocking reagents used to suppress background in hybridization experiments. Typical blocking reagents include Denhardt's reagent, BLOTTO, heparin, denatured salmon sperm DNA, and commercially available proprietary formulations. The inclusion of specific blocking reagents may require modification of the hybridization conditions described above, due to problems with compatibility.

[0018] Of course, a polynucleotide which hybridizes only to polyA+ sequences (such as any 3′ terminal polyA+ tract of a cDNA shown in the sequence listing), or to a complementary stretch of T (or U) residues, would not be included in the definition of “polynucleotide,” since such a polynucleotide would hybridize to any nucleic acid molecule containing a poly (A) stretch or the complement thereof (e.g., practically any double-stranded cDNA clone generated using oligo dT as a primer).

[0019] The polynucleotide of the present invention can be composed of any polyribonucleotide or polydeoxribonucleotide, which may be unmodified RNA or DNA or modified RNA or DNA. For example, polynucleotides can be composed of single- and double-stranded DNA, DNA that is a mixture of single- and double-stranded regions, single- and double-stranded RNA, and RNA that is mixture of single- and double-stranded regions, hybrid molecules comprising DNA and RNA that may be single-stranded or, more typically, double-stranded or a mixture of single- and double-stranded regions. In addition, the polynucleotide can be composed of triple-stranded regions comprising RNA or DNA or both RNA and DNA. A polynucleotide may also contain one or more modified bases or DNA or RNA backbones modified for stability or for other reasons. “Modified” bases include, for example, tritylated bases and unusual bases such as inosine. A variety of modifications can be made to DNA and RNA; thus, “polynucleotide” embraces chemically, enzymatically, or metabolically modified forms.

[0020] The polypeptide of the present invention can be composed of amino acids joined to each other by peptide bonds or modified peptide bonds, i.e., peptide isosteres, and may contain amino acids other than the 20 gene-encoded amino acids. The polypeptides may be modified by either natural processes, such as posttranslational processing, or by chemical modification techniques which are well known in the art. Such modifications are well described in basic texts and in more detailed monographs, as well as in a voluminous research literature. Modifications can occur anywhere in a polypeptide, including the peptide backbone, the amino acid side-chains and the amino or carboxyl termini. It will be appreciated that the same type of modification may be present in the same or varying degrees at several sites in a given polypeptide. Also, a given polypeptide may contain many types of modifications. Polypeptides may be branched, for example, as a result of ubiquitination, and they may be cyclic, with or without branching. Cyclic, branched, and branched cyclic polypeptides may result from posttranslation natural processes or may be made by synthetic methods. Modifications include acetylation, acylation, ADP-ribosylation, amidation, covalent attachment of flavin, covalent attachment of a heme moiety, covalent attachment of a nucleotide or nucleotide derivative, covalent attachment of a lipid or lipid derivative, covalent attachment of phosphotidylinositol, cross-linking, cyclization, disulfide bond formation, demethylation, formation of covalent cross-links, formation of cysteine, formation of pyroglutamate, formylation, gamma-carboxylation, glycosylation, GPI anchor formation, hydroxylation, iodination, methylation, myristoylation, oxidation, pegylation, proteolytic processing, phosphorylation, prenylation, racemization, selenoylation, sulfation, transfer-RNA mediated addition of amino acids to proteins such as arginylation, and ubiquitination. (See, for instance, PROTEINS—STRUCTURE AND MOLECULAR PROPERTIES, 2nd Ed., T. E. Creighton, W. H. Freeman and Company, New York (1993); POSTTRANSLATIONAL COVALENT MODIFICATION OF PROTEINS, B. C. Johnson, Ed., Academic Press, New York, pgs. 1-12 (1983); Seifter et al., Meth Enzymol 182:626-646 (1990); Rattan et al., Ann NY Acad Sci 663:48-62 (1992).)

[0021] “SEQ ID NO:X” refers to a polynucleotide sequence while “SEQ ID NO:Y” refers to a polypeptide sequence, both sequences identified[by an integer specified in Table 1.

[0022] “A polypeptide having biological activity” refers to polypeptides exhibiting activity similar, but not necessarily identical to, an activity of a polypeptide of the present invention, including mature forms, as measured in a particular biological assay, with or without dose dependency. In the case where dose dependency does exist, it need not be identical to that of the polypeptide, but rather substantially similar to the dose-dependence in a given activity as compared to the polypeptide of the present invention (i.e., the candidate polypeptide will exhibit greater activity or not more than about 25-fold less and, preferably, not more than about tenfold less activity, and most preferably, not more than about three-fold less activity relative to the polypeptide of the present invention.)

[0023] Polynucleotides and Polypeptides of the Invention

[0024] Features of Protein Encoded by Gene No: 1

[0025] This gene is expressed primarily in melanocytes and, to a lesser extent, in testes, ovary, kidney and other tissues.

[0026] Polynucleotides and polypeptides of the invention are useful as reagents for differential identification of the tissue(s) or cell type(s) present in a biological sample and for diagnosis of diseases and conditions which include, but are not limited to, disorders of neural crest derived cells including pigmentation defects, melanoma, reproductive organ defects, and defects of the kidney. Similarly, polypeptides and antibodies directed to these polypeptides are useful in providing immunological probes for differential identification of the tissue(s) or cell type(s). For a number of disorders of the above tissues or cells, particularly of the skin, reproductive, and renal systems, expression of this gene at significantly higher or lower levels may be routinely detected in certain tissues or cell types (e.g. melanocytes, testes, ovary, kidney, cancerous and wounded tissues) or bodily fluids (e.g., lymph, serum, plasma, urine, synovial fluid and spinal fluid) or another tissue or cell sample taken from an individual having such a disorder, relative to the standard gene expression level, i.e., the expression level in healthy tissue or bodily fluid from an individual not having the disorder.

[0027] The tissue distribution in melanocytes indicates that the protein product of this gene is useful for treating disorders that arise from alterations in the number or fate of neural crest derived cells including cancers such as melanoma and defects of the developing reproductive system.

[0028] Many polynucleotide sequences, such as EST sequences, are publicly available and accessible through sequence databases. Some of these sequences are related to SEQ ID NO:11 and may have been publicly available prior to conception of the present invention. Preferably, such related polynucleotides are specifically excluded from the scope of the present invention. To list every related sequence is cumbersome. Accordingly, preferably excluded from the present invention are one or more polynucleotides comprising a nucleotide sequence described by the general formula of a-b, where a is any integer between 1 to 2512 of SEQ ID NO:11, b is an integer of 15 to 2526, where both a and b correspond to the positions of nucleotide residues shown in SEQ ID NO:11, and where b is greater than or equal to a+14.

[0029] Features of Protein Encoded by Gene No: 2

[0030] In specific embodiments, polypeptides of the invention comprise, or alternatively consists of, the following amino acid sequence: ENMICVKCLPQYPEHSKHV (SEQ ID NO:487). Moreover, fragments and variants of this polypeptide (such as, for example, fragments as described herein, polypeptides at least 80%, 85%, 90%, 95%, 96%, 97%, 98%, or 99% identical to these polypeptides and polypeptides encoded by the polynucleotide which hybridize, under stringent conditions, to the polynucleotide encoding this polypeptide are encompassed by the invention. Antibodies that bind polypeptides of the invention are also encompassed by the invention. Polynucleotides encoding this polypeptide are also encompassed by the invention.

[0031] This gene is expressed primarily in infant brain and fetal lung.

[0032] Polynucleotides and polypeptides of the invention are useful as reagents for differential identification of the tissue(s) or cell type(s) present in a biological sample and for diagnosis of diseases and conditions which include, but are not limited to, developmental disorders of the brain or lung. Similarly, polypeptides and antibodies directed to these polypeptides are useful in providing immunological probes for differential identification of the tissue(s) or cell type(s). For a number of disorders of the above tissues or cells, particularly of the central nervous and pulmonary systems, expression of this gene at significantly higher or lower levels may be routinely detected in certain tissues or cell types (e.g. brain, lung, cancerous and wounded tissues) or bodily fluids (e.g., lymph, serum, plasma, urine, synovial fluid and spinal fluid) or another tissue or cell sample taken from an individual having such a disorder, relative to the standard gene expression level, i.e., the expression level in healthy tissue or bodily fluid from an individual not having the disorder.

[0033] The tissue distribution in infant brain and fetal lung indicates that the protein product of this gene is useful for treating or diagnosing disorders associated with abnormal proliferation of cells in the Central nervous system and developing lung. Furthermore, the protein product of this gene is useful for the detection/treatment of neurodegenerative disease states and behavioral disorders such as Alzheimer's Disease, Parkinson's Disease, Huntington's Disease, Tourette's Syndrome, schizophrenia, mania, dementia, paranoia, obsessive compulsive disorder, panic disorder, learning disabilities, ALS, psychoses, autism, and altered behaviors, including disorders in feeding, sleep patterns, balance, and perception. In addition, the gene or gene product may also play a role in the treatment and/or detection of developmental disorders associated with the developing embryo, or sexually-linked disorders. Protein, as well as, antibodies directed against the protein may show utility as a tumor marker and/or immunotherapy targets for the above listed tissues.

[0034] Many polynucleotide sequences, such as EST sequences, are publicly available and accessible through sequence databases. Some of these sequences are related to SEQ ID NO:12 and may have been publicly available prior to conception of the present invention. Preferably, such related polynucleotides are specifically excluded from the scope of the present invention. To list every related sequence is cumbersome. Accordingly, preferably excluded from the present invention are one or more polynucleotides comprising a nucleotide sequence described by the general formula of a-b, where a is any integer between 1 to 1117 of SEQ ID NO:12, b is an integer of 15 to 1131, where both a and b correspond to the positions of nucleotide residues shown in SEQ ID NO:12, and where b is greater than or equal to a+14.

[0035] Features of Protein Encoded by Gene No: 3

[0036] In specific embodiments, polypeptides of the invention comprise, or alternatively consists of, the following amino acid sequence: [sequence omitted] (SEQ ID NO:488). Moreover, fragments and variants of this polypeptide (such as, for example, fragments as described herein, polypeptides at least 80%, 85%, 90%, 95%, 96%, 97%, 98%, or 99% identical to these polypeptides and polypeptides encoded by the polynucleotide which hybridize, under stringent conditions, to the polynucleotide encoding this polypeptide are encompassed by the invention. Antibodies that bind polypeptides of the invention are also encompassed by the invention. Polynucleotides encoding this polypeptide are also encompassed by the invention.

[0037] This gene is expressed primarily in breast lymph node, and to a lesser extent, in ovarian cancer and chondrosarcoma.

[0038] Polynucleotides and polypeptides of the invention are useful as reagents for differential identification of the tissue(s) or cell type(s) present in a biological sample and for diagnosis of diseases and conditions which include, but are not limited to, immune responses such as inflammation or immune surveillance for tumors. This gene may be important for inflammatory responses associated with tumors. Similarly, polypeptides and antibodies directed to these polypeptides are useful in providing immunological probes for differential identification of the tissue(s) or cell type(s). For a number of disorders of the above tissues or cells, particularly of the immune system, expression of this gene at significantly higher or lower levels may be routinely detected in certain tissues or cell types (e.g. lymph nodes, cancerous and wounded tissues) or bodily fluids (e.g. lymph, serum, plasma, urine, synovial fluid and spinal fluid) or another tissue or cell sample taken from an individual having such a disorder, relative to the standard gene expression level, i e., the expression level in healthy tissue or bodily fluid from an individual not having the disorder.

[0039] Predicted epitopes include those comprising a sequence shown in SEQ ID NO:251 as residues: Lys-45 to Val-50, and/or Lys-69 to Arg-76.

[0040] The tissue distribution in breast lymph node indicates that the protein product of this gene is useful for the treatment or diagnosis of immune responses, including those associated with tumor-induced inflammation. Furthermore, given the tissue distribution, the gene product may also be involved in lymphopoiesis. In a case such as this, it can be used in immune disorders such as infection, inflammation, allergy, immunodeficiency etc. Protein, as well as, antibodies directed against the protein may show utility as a tumor marker and/or immunotherapy targets for the above listed tissues.

[0041] Many polynucleotide sequences, such as EST sequences, are publicly available and accessible through sequence databases. Some of these sequences are related to SEQ ID NO:13 and may have been publicly available prior to conception of the present invention. Preferably, such related polynucleotides are specifically excluded from the scope of the present invention. To list every related sequence is cumbersome. Accordingly, preferably excluded from the present invention are one or more polynucleotides comprising a nucleotide sequence described by the general formula of a-b, where a is any integer between 1 to 927 of SEQ ID NO:13, b is an integer of 15 to 941, where both a and b correspond to the positions of nucleotide residues shown in SEQ ID NO:13, and where b is greater than or equal to a+14.

[0042] Features of Protein Encoded by Gene No: 4

[0043] In specific embodiments, polypeptides of the invention comprise, or alternatively consists of, the following amino acid sequence: ELVESPGAAGNSARSGNVVC (SEQ ID NO:489). Moreover, fragments and variants of this polypeptide (such as, for example, fragments as described herein, polypeptides at least 80%, 85%, 90%, 95%, 96%, 97%, 98%, or 99% identical to these polypeptides and polypeptides encoded by the polynucleotide which hybridize, under stringent conditions, to the polynucleotide encoding this polypeptide are encompassed by the invention. Antibodies that bind polypeptides of the invention are also encompassed by the invention. Polynucleotides encoding this polypeptide are also encompassed by the invention.

[0044] This gene is expressed primarily in T-cells and T-cell lymphomas.

[0045] Polynucleotides and polypeptides of the invention are useful as reagents for differential identification of the tissue(s) or cell type(s) present in a biological sample and for diagnosis of diseases and conditions which include, but are not limited to, immunological diseases involving T-cells such as inflammation, autoimmunity, and cancers including T-cell lymphomas. Similarly, polypeptides and antibodies directed to these polypeptides are useful in providing immunological probes for differential identification of the tissue(s) or cell type(s). For a number of disorders of the above tissues or cells, particularly of T-cells and other cells of the immune system, expression of this gene at significantly higher or lower levels may be routinely detected in certain tissues or cell types (e.g. immune, cancerous and wounded tissues) or bodily fluids (e.g. lymph, serum, plasma, urine, synovial fluid and spinal fluid) or another tissue or cell sample taken from an individual having such a disorder, relative to the standard gene expression level, i.e., the expression level in healthy tissue or bodily fluid from an individual not having the disorder.

[0046] The tissue distribution in T-cells and T-cell lymphomas indicates that the protein product of this gene is useful for diagnosing and treating T-cell based disorders such as inflammatory diseases, autoimmune disease and tumors including T-cell lymphomas. Furthermore, the tissue distribution indicates that the polypeptides or polynucleotides are useful for the treatment, prophylaxis, and diagnosis of immune and autoimmune diseases, such as lupus, transplant rejection, allergic reactions, arthritis, asthma, immunodeficiency diseases, leukemia, and AIDS. Additionally, expression of this gene product in T cells also strongly indicates a role for this protein in immune function and immune surveillance. Protein, as well as, antibodies directed against the protein may show utility as a tumor marker and/or immunotherapy targets for the above listed tissues.

[0047] Many polynucleotide sequences, such as EST sequences, are publicly available and accessible through sequence databases. Some of these sequences are related to SEQ ID NO:14 and may have been publicly available prior to conception of the present invention. Preferably, such related polynucleotides are specifically excluded from the scope of the present invention. To list every related sequence is cumbersome. Accordingly, preferably excluded from the present invention are one or more polynucleotides comprising a nucleotide sequence described by the general formula of a-b, where a is any integer between 1 to 829 of SEQ ID NO:14, b is an integer of 15 to 843, where both a and b correspond to the positions of nucleotide residues shown in SEQ ID NO:14, and where b is greater than or equal to a+14.

[0048] Features of Protein Encoded by Gene No: 5

[0049] This gene is expressed primarily in activated monocytes.

[0050] Polynucleotides and polypeptides of the invention are useful as reagents for differential identification of the tissue(s) or cell type(s) present in a biological sample and for diagnosis of diseases and conditions which include, but are not limited to, inflammation, autoimmunity, infection, or disorders involving activation of monocytes. Similarly, polypeptides and antibodies directed to these polypeptides are useful in providing immunological probes for differential identification of the tissue(s) or cell type(s). For a number of disorders of the above tissues or cells, particularly of the immune system, expression of this gene at significantly higher or lower levels may be routinely detected in certain tissues or cell types (e.g. immune, cancerous and wounded tissues) or bodily fluids (e.g. lymph, serum, plasma, urine, synovial fluid and spinal fluid) or another tissue or cell sample taken from an individual having such a disorder, relative to the standard gene expression level, i.e., the expression level in healthy tissue or bodily fluid from an individual not having the disorder.

[0051] Predicted epitopes include those comprising a sequence shown in SEQ ID NO:253 as residues: Asp-19 to Arg-31.

[0052] The tissue distribution indicates that the protein product of this gene is useful for diagnosing or treating diseases that result in activation of monocytes including infections, inflammatory responses or autoimmune diseases. Furthermore, expression of this gene product in monocytes also strongly indicates a role for this protein in immune function and immune surveillance.

[0053] Many polynucleotide sequences, such as EST sequences, are publicly available and accessible through sequence databases. Some of these sequences are related to SEQ ID NO:15 and may have been publicly available prior to conception of the present invention. Preferably, such related polynucleotides are specifically excluded from the scope of the present invention. To list every related sequence is cumbersome. Accordingly, preferably excluded from the present invention are one or more polynucleotides comprising a nucleotide sequence described by the general formula of a-b, where a is any integer between 1 to 1004 of SEQ ID NO:15, b is an integer of 15 to 1018, where both a and b correspond to the positions of nucleotide residues shown in SEQ ID NO:15, and where b is greater than or equal to a+14.

[0054] Features of Protein Encoded by Gene No: 6

[0055] The translation product of this gene shares sequence homology with terminal deoxynucleotidyltransferase which is thought to be important in catalyzing the elongation of oligo- or polydeoxynucleotide chains.

[0056] In specific embodiments, polypeptides of the invention comprise, or alternatively consists of, the following amino acid sequence: FKKLVNPRXQGIRHEEEAVSWQERR (SEQ ID NO:490). Moreover, fragments and variants of this polypeptide (such as, for example, fragments as described herein, polypeptides at least 80%, 85%, 90%, 95%, 96%, 97%, 98%, or 99% identical to these polypeptides and polypeptides encoded by the polynucleotide which hybridize, under stringent conditions, to the polynucleotide encoding this polypeptide are encompassed by the invention. Antibodies that bind polypeptides of the invention are also encompassed by the invention. Polynucleotides encoding this polypeptide are also encompassed by the invention.

[0057] This gene is expressed primarily in activated human neutrophils, and to a lesser extent in T-cells, primary dendritic cells and bone marrow cells.

[0058] Polynucleotides and polypeptides of the invention are useful as reagents for differential identification of the tissue(s) or cell type(s) present in a biological sample and for diagnosis of diseases and conditions which include, but are not limited to, cancers, particularly those of the blood such as leukemia and deficiencies in neutrophils such as neutropenia, and immune system disorders. Similarly, polypeptides and antibodies directed to these polypeptides are useful in providing immunological probes for differential identification of the tissue(s) or cell type(s). For a number of disorders of the above tissues or cells, particularly of the cardiovascular and immune systems, expression of this gene at significantly higher or lower levels may be routinely detected in certain tissues or cell types (e.g. immune, cancerous and wounded tissues) or bodily fluids (e.g. lymph, serum, plasma, urine, synovial fluid and spinal fluid) or another tissue or cell sample taken from an individual having such a disorder, relative to the standard gene expression level, i.e., the expression level in healthy tissue or bodily fluid from an individual not having the disorder.

[0059] The tissue distribution in neutrophils and other immune cells, combined with the homology to terminal deoxynucleotidyltransferase indicates that the protein product of this gene is useful for the treatment and differential diagnosis of acute leukemias. Alternatively, this gene may function in the proliferation of neutrophils and be useful as a treatment for neutropenia, for example, following neutropenia as a result of chemotherapy. Additionally, the tissue distribution indicates that the protein product of this gene is useful for the diagnosis and/or treatment of hematopoietic disorders. This gene product is primarily expressed in hematopoietic cells and tissues, suggesting that it plays a role in the survival, proliferation, and/or differentiation of hematopoietic lineages. This is particularly supported by the expression of this gene product in bone marrow, which is a primary site of definitive hematopoiesis. Expression of this gene product in T cells and primary dendritic cells also strongly indicates a role for this protein in immune function and immune surveillance.

[0060] Many polynucleotide sequences, such as EST sequences, are publicly available and accessible through sequence databases. Some of these sequences are related to SEQ ID NO:16 and may have been publicly available prior to conception of the present invention. Preferably, such related polynucleotides are specifically excluded from the scope of the present invention. To list every related sequence is cumbersome. Accordingly, preferably excluded from the present invention are one or more polynucleotides comprising a nucleotide sequence described by the general formula of a-b, where a is any integer between 1 to 647 of SEQ ID NO:16, b is an integer of 15 to 661, where both a and b correspond to the positions of nucleotide residues shown in SEQ ID NO:16, and where b is greater than or equal to a+14.

[0061] Features of Protein Encoded by Gene No: 7

[0062] The translation product of this gene exhibits a reasonable homology to the human chorionic gonadotropic (HCG) analogue-GT beta-subunit as disclosed in U.S. Pat. No. 5,508,261 and PCT Publication No. WO 92/22568. There is a high degree of conservation of the structurally important cysteine residues between these proteins.

[0063] This gene is expressed primarily in IL-1 and LPS induced neutrophils.

[0064] Polynucleotides and polypeptides of the invention are useful as reagents for differential identification of the tissue(s) or cell type(s) present in a biological sample and for diagnosis of diseases and conditions which include, but are not limited to, diseases of the immune system, including inflammatory diseases and allergies. Similarly, polypeptides and antibodies directed to these polypeptides are useful in providing immunological probes for differential identification of the tissue(s) or cell type(s). For a number of disorders of the above tissues or cells, particularly of the immune system, expression of this gene at significantly higher or lower levels may be routinely detected in certain tissues or cell types (e.g., immune, cancerous and wounded tissues) or bodily fluids (e.g. lymph, serum, plasma, urine, synovial fluid and spinal fluid) or another tissue or cell sample taken from an individual having such a disorder, relative to the standard gene expression level, i.e., the expression level in healthy tissue or bodily fluid from an individual not having the disorder.

[0065] The tissue distribution in neutrophils indicates that the protein product of this gene is useful for the treatment/diagnosis of diseases of the immune system, since expression is primarily in neutrophils, and thus the translation product of this gene may be useful as a growth factor for the differentiation and/or proliferation of neutrophils for the treatment of neutropenia, for example following chemotherapy.

[0066] Many polynucleotide sequences, such as EST sequences, are publicly available and accessible through sequence databases. Some of these sequences are related to SEQ ID NO:17 and may have been publicly available prior to conception of the present invention. Preferably, such related polynucleotides are specifically excluded from the scope of the present invention. To list every related sequence is cumbersome. Accordingly, preferably excluded from the present invention are one or more polynucleotides comprising a nucleotide sequence described by the general formula of a-b, where a is any integer between 1 to 539 of SEQ ID NO:17, b is an integer of 15 to 553, where both a and b correspond to the positions of nucleotide residues shown in SEQ ID NO:17, and where b is greater than or equal to a+14.

[0067] Features of Protein Encoded by Gene No: 8

[0068] This gene is expressed primarily in IL-1 and LPS-induced neutrophils.

[0069] Polynucleotides and polypeptides of the invention are useful as reagents for differential identification of the tissue(s) or cell type(s) present in a biological sample and for diagnosis of diseases and conditions which include, but are not limited to, diseases of the immune system, including inflammatory diseases and allergies. Similarly, polypeptides and antibodies directed to these polypeptides are useful in providing immunological probes for differential identification of the tissue(s) or cell type(s). For a number of disorders of the above tissues or cells, particularly of the immune system, expression of this gene at significantly higher or lower levels may be routinely detected in certain tissues or cell types (e.g., immune, cancerous and wounded tissues) or bodily fluids (e.g. lymph, serum, plasma, urine, synovial fluid and spinal fluid) or another tissue or cell sample taken from an individual having such a disorder, relative to the standard gene expression level, i.e., the expression level in healthy tissue or bodily fluid from an individual not having the disorder.

[0070] Predicted epitopes include those comprising a sequence shown in SEQ ID NO:256 as residues: Ser-14 to Pro-22, and/or Leu-43 to Val-53.

[0071] The tissue distribution in neutrophils indicates that the protein product of this gene is useful for the treatment and diagnosis of diseases of the immune system, since expression is primarily in neutrophils, and thus the translation product of this gene may be useful as a growth factor for the differentiation and/or proliferation of neutrophils for the treatment of neutropenia, for example following chemotherapy.

[0072] Many polynucleotide sequences, such as EST sequences, are publicly available and accessible through sequence databases. Some of these sequences are related to SEQ ID NO:18 and may have been publicly available prior to conception of the present invention. Preferably, such related polynucleotides are specifically excluded from the scope of the present invention. To list every related sequence is cumbersome. Accordingly, preferably excluded from the present invention are one or more polynucleotides comprising a nucleotide sequence described by the general formula of a-b, where a is any integer between 1 to 855 of SEQ ID NO:18, b is an integer of 15 to 869, where both a and b correspond to the positions of nucleotide residues shown in SEQ ID NO:18, and where b is greater than or equal to a+14.

[0073] Features of Protein Encoded by Gene No: 9

[0074] When tested against Jurkat cell lines, supernatants removed from cells expressing this gene activated the NF-kB transcription factor. Thus, it is likely that the protein encoded by this gene activates Jurkat cells by activating a transcriptional factor found within these cells. Nuclear factor kB is a transcription factor activated by a wide variety of agents, leading to cell activation, differentiation, or apoptosis. Reporter constructs utilizing the NF-kB promoter element are used to screen supernatants for such activity.

[0075] This gene is expressed primarily in IL-1 and LPS induced neutrophils.

[0076] Polynucleotides and polypeptides of the invention are useful as reagents for differential identification of the tissue(s) or cell type(s) present in a biological sample and for diagnosis of diseases and conditions which include, but are not limited to, diseases of the immune system, including inflammatory diseases and allergies. Similarly, polypeptides and antibodies directed to these polypeptides are useful in providing immunological probes for differential identification of the tissue(s) or cell type(s). For a number of disorders of the above tissues or cells, particularly of the immune system, expression of this gene at significantly higher or lower levels may be routinely detected in certain tissues or cell types (e.g., immune, cancerous and wounded tissues) or bodily fluids (e.g. lymph, serum, plasma, urine, synovial fluid and spinal fluid) or another tissue or cell sample taken from an individual having such a disorder, relative to the standard gene expression level, i.e., the expression level in healthy tissue or bodily fluid from an individual not having the disorder.

[0077] Predicted epitopes include those comprising a sequence shown in SEQ ID NO:257 as residues: Tyr-22 to His-35.

[0078] The tissue distribution in neutrophils, combined with the biological activity data suggest that the protein product of this gene is useful for the treatment and/or diagnosis of diseases of the immune system, since expression is primarily in neutrophils, and thus the translation product of this gene may be useful as a growth factor for the differentiation and/or proliferation of neutrophils for the treatment of neutropenia, for example following chemotherapy.

[0079] Many polynucleotide sequences, such as EST sequences, are publicly available and accessible through sequence databases. Some of these sequences are related to SEQ ID NO:19 and may have been publicly available prior to conception of the present invention. Preferably, such related polynucleotides are specifically excluded from the scope of the present invention. To list every related sequence is cumbersome. Accordingly, preferably excluded from the present invention are one or more polynucleotides comprising a nucleotide sequence described by the general formula of a-b, where a is any integer between 1 to 945 of SEQ ID NO:19, b is an integer of 15 to 959, where both a and b correspond to the positions of nucleotide residues shown in SEQ ID NO:19, and where b is greater than or equal to a+14.

[0080] Features of Protein Encoded by Gene No: 10

[0081] This gene is expressed primarily in activated T-cells and to a lesser extent in endothelial cells.

[0082] Polynucleotides and polypeptides of the invention are useful as reagents for differential identification of the tissue(s) or cell type(s) present in a biological sample and for diagnosis of diseases and conditions which include, but are not limited to, immune dysfunctions including cancer of the T lymphocytes and autoimmune disorders and inflammation. Similarly, polypeptides and antibodies directed to these polypeptides are useful in providing immunological probes for differential identification of the tissue(s) or cell type(s). For a number of disorders of the above tissues or cells, particularly of the immune system, expression of this gene at significantly higher or lower levels may be routinely detected in certain tissues or cell types (e.g. immune, cancerous and wounded tissues) or bodily fluids (e.g. lymph, serum, plasma, urine, synovial fluid and spinal fluid) or another tissue or cell sample taken from an individual having such a disorder, relative to the standard gene expression level, i.e., the expression level in healthy tissue or bodily fluid from an individual not having the disorder.

[0083] The tissue distribution in activated T-cells indicates that the protein product of this gene is useful for the treatment and/or diagnosis of immune disorders, particularly of T-cell origin, and may act as a growth factor for particular subsets of T-cells such as CD4 positive cells, which would make this a useful therapeutic for the treatment of HIV and other immune compromising illnesses. Furthermore, this gene product may be involved in the regulation of cytokine production, antigen presentation, or other processes that may also suggest a usefulness in the treatment of AIDS or other immune compromising diseases (e.g. by boosting immune responses).

[0084] Many polynucleotide sequences, such as EST sequences, are publicly available and accessible through sequence databases. Some of these sequences are related to SEQ ID NO:20 and may have been publicly available prior to conception of the present invention. Preferably, such related polynucleotides are specifically excluded from the scope of the present invention. To list every related sequence is cumbersome. Accordingly, preferably excluded from the present invention are one or more polynucleotides comprising a nucleotide sequence described by the general formula of a-b, where a is any integer between 1 to 1432 of SEQ ID NO:20, b is an integer of 15 to 1446, where both a and b correspond to the positions of nucleotide residues shown in SEQ ID NO:20, and where b is greater than or equal to a+14.

[0085] Features of Protein Encoded by Gene No: 11

[0086] The gene encoding the disclosed cDNA is thought to reside on chromosome 3. Accordingly, polynucleotides related to this invention are useful as a marker in linkage analysis for chromosome 3.

[0087] This gene is expressed primarily in fetal tissues, such as liver/spleen and brain, as well as in placental tissue.

[0088] Polynucleotides and polypeptides of the invention are useful as reagents for differential identification of the tissue(s) or cell type(s) present in a biological sample and for the diagnosis of many developmental abnormalities. Similarly, polypeptides and antibodies directed to these polypeptides are useful in providing immunological probes for differential identification of the tissue(s) or cell type(s). For a number of disorders of the above tissues or cells, particularly of the developing fetus, expression of this gene at significantly higher or lower levels may be routinely detected in certain tissues or cell types (e.g. fetal, placental, cancerous and wounded tissues) or bodily fluids (e.g., lymph, serum, plasma, urine, synovial fluid and spinal fluid) or another tissue or cell sample taken from an individual having such a disorder, relative to the standard gene expression level, i.e., the expression level in healthy tissue or bodily fluid from an individual not having the disorder.

[0089] The tissue distribution in fetal tissues indicates that the protein product of this gene is useful as a growth factor or differentiation factor for particular cell types in the developing fetus and may be useful in replacement or other types of therapy in cases where the gene is expressed aberrantly. Furthermore, the tissue distribution indicates that the protein product of this gene is useful for the diagnosis and/or treatment of disorders of the placenta. Specific expression within the placenta indicates that this gene product may play a role in the proper establishment and maintenance of placental function. Alternately, this gene product may be produced by the placenta and then transported to the embryo, where it may play a crucial role in the development and/or survival of the developing embryo or fetus. Expression of this gene product in a vascular-rich tissue such as the placenta also indicates that this gene product may be produced more generally in endothelial cells or within the circulation. In such instances, it may play more generalized roles in vascular function, such as in angiogenesis. It may also be produced in the vasculature and have effects on other cells within the circulation, such as hematopoietic cells. It may serve to promote the proliferation, survival, activation, and/or differentiation of hematopoietic cells, as well as other cells throughout the body.

[0090] Many polynucleotide sequences, such as EST sequences, are publicly available and accessible through sequence databases. Some of these sequences are related to SEQ ID NO:21 and may have been publicly available prior to conception of the present invention. Preferably, such related polynucleotides are specifically excluded from the scope of the present invention. To list every related sequence is cumbersome. Accordingly, preferably excluded from the present invention are one or more polynucleotides comprising a nucleotide sequence described by the general formula of a-b, where a is any integer between 1 to 1457 of SEQ ID NO:21, b is an integer of 15 to 1471, where both a and b correspond to the positions of nucleotide residues shown in SEQ ID NO:21, and where b is greater than or equal to a+14.

[0091] Features of Protein Encoded by Gene No: 12

[0092] In specific embodiments, polypeptides of the invention comprise, or alternatively consists of, an amino acid sequence selected from the group: ISVLXYPHCVVHELPELTAESLEAGDSNQFCWRNLFSCINLLRILNKLTKWKH SRTMMLVVFKSAPILKRALKVKQAMMQLYVLKLLKVQTKYLGRQWRKSN MKTMSAIYQKVRHRLNDDWAYGNDLDARPWDFQiEECALRANIERFNARR YDRAHSNPDFLPVDNCLQSVLGQRVDLPEDFQMNYDLWLEREVFSKPISWEE LL (SEQ ID NO:491), MRAASPPASASDLIEQQQKRGRREHKALIKQDNLDAFNERD PYKADDSREEEEENDDDNSLEGETFPLERDEVMPPPLQHPQTDRLXCPKGLP WXPKVREKDIEMFLESSRSKFIGYTLGSDTNTVVGLPRPIHESIKTLKQHKYTS IAEVQAQMEEEYLRSPLSGGEEEVEQVPAETLYQGLLPSLPQYMIALLKILLA AAPTSKAKTDSINILADVLPEEMPTTVLQSMKLGVDVNRHKEVIVKAISAVLL LLLKHFKLNHVYQFEYMAQHLVFANCIPLILKFFNQNIMSYITAKNSISVLDYP HCVVHELPELTAESLEAGDSNQFCWRNLFSCINLLRILNKLTKWKHSRTMML VVFKSAPILKRALKVKQAMMQLYVLKLLKVQTKYLGRQWRKSNMKTMSAI YQKVRHRLNDDWAYGNDLDARPWDFQAEECALRANIERFNARRYDRAHSN PDFLPVDNCLQSVLGQRVDLPEDFQMNYDLWLEREVFSKPISWEELLQ (SEQ ID NO:492), MRAASPPASASDLIEQQQKRGRREHKALIKQDNLDAFNERDPYKADDSRE (SEQ ID NO:493), EEEENDDDNSLEGETFPLERDEVMPPPLQHPQTDRLX CPKGLPWX (SEQ ID NO:494), PKVREKDIEMFLESSRSKFIGYTLGSDTNTV VGLPRPIHESIKTLKQHKYT (SEQ ID NO:495), SIAEVQAQMEEEYLRSPLSGG EEEVEQVPAETLYQGLLPSLPQYMIA (SEQ ID NO:496), LLKILLAAAPTSKAK TDSINILADVLPEEMPTTVLQSMKLGVDVNRHK (SEQ ID NO:497), EVIVKA ISAVLLLLLKHFKLNHVYQFEYMAQHLVFANCIPLILKFFNQNI (SEQ ID NO:498), MSYITAKNSISVLDYPHCVVHELPELTAESLEAGDSNQFCWRNLFSCI (SEQ ID NO:499), NLLRILNKLTKWKHSRTMMLVVFKSAPILKRALKVKQ AMMQLYVLKL (SEQ ID NO:500), LKVQTKYLGRQWRKSNMKTMSAIYQKVRH RLNDDWAYGNDLDARP (SEQ ID NO:501), WDFQAEECALRANIERFNARRYDR AHSNPDFLPVDNCLQSVLGQRVDL (SEQ ID NO:502), and PEDFQMNYDLWLE REV FSKPISWEELLQ (SEQ ID NO:503). Moreover, fragments and variants of these polypeptides (such as, for example, fragments as described herein, polypeptides at least 80%, 85%, 90%, 95%, 96%, 97%, 98%, or 99% identical to these polypeptides and polypeptides encoded by the polynucleotide which hybridizes, under stringent conditions, to the polynucleotide encoding these polypeptides) are encompassed by the invention. Antibodies that bind polypeptides of the invention are also encompassed by the invention. Polynucleotides encoding these polypeptides are also encompassed by the invention.

[0093] The translation product of this gene shares sequence homology with a C. elegans protein (gi|1086830 coded for by C. elegans cDNA yk20f8.5).

[0094] This gene is expressed primarily in T-cells, and to a lesser extent in tumor tissue including glioblastoma, menangioma, and Wilm's tumor.

[0095] Polynucleotides and polypeptides of the invention are useful as reagents for differential identification of the tissue(s) or cell type(s) present in a biological sample and for diagnosis of diseases and conditions which include, but are not limited to, diseases of the immune system, including autoimmune conditions such as rheumatoid arthritis, inflammatory disorders and cancer. Similarly, polypeptides and antibodies directed to these polypeptides are useful in providing immunological probes for differential identification of the tissue(s) or cell type(s). For a number of disorders of the above tissues or cells, particularly of the immune system, expression of this gene at significantly higher or lower levels may be routinely detected in certain tissues or cell types (e.g. immune, cancerous and wounded tissues) or bodily fluids (e.g. lymph, serum, plasma, urine, synovial fluid and spinal fluid) or another tissue or cell sample taken from an individual having such a disorder, relative to the standard gene expression level, i.e., the expression level in healthy tissue or bodily fluid from an individual not having the disorder.

[0096] Predicted epitopes include those comprising a sequence shown in SEQ ID NO:260 as residues: Thr-9 to Ser-14.

[0097] The tissue distribution in T-cells indicates that the protein product of this gene is useful for the diagnosis and/or modulation of immune function disorders, including rheumatoid arthritis and inflammatory responses. Furthermore, this gene product may be involved in the regulation of cytokine production, antigen presentation, or other processes that may also suggest a usefulness in the treatment of cancer (e.g. by boosting immune responses). Since the gene is expressed in cells of lymphoid origin, the gene or protein, as well as, antibodies directed against the protein may show utility as a tumor marker and/or immunotherapy targets for the above listed tissues. Expression of this gene product in T cells also strongly indicates a role for this protein in immune function and immune surveillance.

[0098] Many polynucleotide sequences, such as EST sequences, are publicly available and accessible through sequence databases. Some of these sequences are related to SEQ ID NO:22 and may have been publicly available prior to conception of the present invention. Preferably, such related polynucleotides are specifically excluded from the scope of the present invention. To list every related sequence is cumbersome. Accordingly, preferably excluded from the present invention are one or more polynucleotides comprising a nucleotide sequence described by the general formula of a-b, where a is any integer between 1 to 1388 of SEQ ID NO:22, b is an integer of 15 to 1402, where both a and b correspond to the positions of nucleotide residues shown in SEQ ID NO:22, and where b is greater than or equal to a+14.

[0099] Features of Protein Encoded by Gene No: 13

[0100] This gene is expressed primarily in placenta, and to a lesser extent in fetal liver and bone marrow.

[0101] Polynucleotides and polypeptides of the invention are useful as reagents for differential identification of the tissue(s) or cell type(s) present in a biological sample and for the diagnosis of hematological disorders. Similarly, polypeptides and antibodies directed to these polypeptides are useful in providing immunological probes for differential identification of the tissue(s) or cell type(s). For a number of disorders of the above tissues or cells, particularly of the hematological and immune systems, expression of this gene at significantly higher or lower levels may be routinely detected in certain tissues or cell types (e.g. placental, immune, cancerous and wounded tissues) or bodily fluids (e.g. lymph, serum, plasma, urine, synovial fluid and spinal fluid) or another tissue or cell sample taken from an individual having such a disorder, relative to the standard gene expression level, i.e., the expression level in healthy tissue or bodily fluid from an individual not having the disorder.

[0102] The tissue distribution in fetal liver, and bone marrow indicates that the protein product of this gene is useful as a growth factor for hematopoietic stem cells or progenitor cells in the treatment of chemotherapy patients or kidney disease. Furthermore, the tissue distribution in placenta indicates that the protein product of this gene is useful for the diagnosis and/or treatment of vascular or reproductive disorders. Specific expression within the placenta indicates that this gene product may play a role in the proper establishment and maintenance of placental function. Alternately, this gene product may be produced by the placenta and then transported to the embryo, where it may play a crucial role in the development and/or survival of the developing embryo or fetus. Expression of this gene product in a vascular-rich tissue such as the placenta also indicates that this gene product may be produced more generally in endothelial cells or within the circulation. In such instances, it may play more generalized roles in vascular function, such as in angiogenesis. It may also be produced in the vasculature and have effects on other cells within the circulation, such as hematopoietic cells. It may serve to promote the proliferation, survival, activation, and/or differentiation of hematopoietic cells, as well as other cells throughout the body.

[0103] Many polynucleotide sequences, such as EST sequences, are publicly available and accessible through sequence databases. Some of these sequences are related to SEQ ID NO:23 and may have been publicly available prior to conception of the present invention. Preferably, such related polynucleotides are specifically excluded from the scope of the present invention. To list every related sequence is cumbersome. Accordingly, preferably excluded from the present invention are one or more polynucleotides comprising a nucleotide sequence described by the general formula of a-b, where a is any integer between 1 to 1033 of SEQ ID NO:23, b is an integer of 15 to 1047, where both a and b correspond to the positions of nucleotide residues shown in SEQ ID NO:23, and where b is greater than or equal to a+14.

[0104] Features of Protein Encoded by Gene No: 14

[0105] This gene is expressed primarily in stromal cells.

[0106] Polynucleotides and polypeptides of the invention are useful as reagents for differential identification of the tissue(s) or cell type(s) present in a biological sample and for diagnosis of hematopoietic disorders including cancer, neutropenia, anemia, and thrombocytopenia. Similarly, polypeptides and antibodies directed to these polypeptides are useful in providing immunological probes for differential identification of the tissue(s) or cell type(s). For a number of disorders of the above tissues or cells, particularly of the hematopoietic and immune systems, expression of this gene at significantly higher or lower levels may be routinely detected in certain tissues or cell types (e.g. immune, cancerous and wounded tissues) or bodily fluids (e.g. lymph, serum, plasma, urine, synovial fluid and spinal fluid) or another tissue or cell sample taken from an individual having such a disorder, relative to the standard gene expression level, i.e., the expression level in healthy tissue or bodily fluid from an individual not having the disorder.

[0107] The tissue distribution in stromal cells indicates that the protein product of this gene is useful as a growth factor for hematopoietic stem cells or progenitor cells, in particular following chemotherapy treatment. Furthermore, the tissue distribution indicates that the protein product of this gene is useful for the treatment and diagnosis of hematopoetic related disorders such as anemia, pancytopenia, leukopenia, thrombocytopenia or leukemia, since stromal cells are important in the production of cells of hematopoietic lineages. The uses include bone marrow cell ex vivo culture, bone marrow transplantation, bone marrow reconstitution, radiotherapy or chemotherapy of neoplasia. The gene product may also be involved in lymphopoiesis, therefore, it can be used in immune disorders such as infection, inflammation, allergy, immunodeficiency etc. In addition, this gene product may have commercial utility in the expansion of stem cells and committed progenitors of various blood lineages, and in the differentiation and/or proliferation of various cell types.

[0108] Many polynucleotide sequences, such as EST sequences, are publicly available and accessible through sequence databases. Some of these sequences are related to SEQ ID NO:24 and may have been publicly available prior to conception of the present invention. Preferably, such related polynucleotides are specifically excluded from the scope of the present invention. To list every related sequence is cumbersome. Accordingly, preferably excluded from the present invention are one or more polynucleotides comprising a nucleotide sequence described by the general formula of a-b, where a is any integer between 1 to 976 of SEQ ID NO:24, b is an integer of 15 to 990, where both a and b correspond to the positions of nucleotide residues shown in SEQ ID NO:24, and where b is greater than or equal to a+14.

[0109] Features of Protein Encoded by Gene No: 15

[0110] The translation product of this gene shares sequence homology with epsilon-COP from Bos taurus, which is thought to be important as a component of coatomer, a complex of seven proteins, that is the major component of the non-clathrin membrane coat.

[0111] In specific embodiments, polypeptides of the invention comprise, or alternatively consists of, an amino acid sequence selected from the group: MAPPAPGPASGGSGEVDELFDVKNAFYIGSYQQCINEAXXVKLSSPERDVER DVFLYRAYLAQRKFGVVLDEIKPSSAPELQAVRMFADYLAHESRRDSIVAEL DREMSRSXDVTNTTFLLMAASIYLHDQNPDAALRALHQGDSLECTAMTVQIL LKLDRLDLARKELKRMQDLDEDATLTQLATAWVSLATGGEKLQDAYYIFQE MADKCSPTLLLLNGQAACHMAQGRWEAAEGLLQEALDKDSGYPETLVNLIV LSQHLGKPPEVTNRYLSQLKDAHRSHPFIKEYQAKENDFDRLVLQYAPSAEA GPELSGP (SEQ ID NO:504), RDVERDVFLYRAYLAQRKFGVVLDEIKPSSAPELQAVRMFADYLAHESRRDS IVAELDREMSRSXDVTNTTFLLMAASIYLHDQNPDAALRALHQGDSLECTAM TVQILLKLDRLDLARKELKRMQDLDEDATLTQLATAWVSLATGGEKLQDAY YIFQEMADKCSPTLLLLNGQAACHMAQGRWEAAEGLLQEALDKDSGYPETL VNLIVLSQHLGKPPEVTNRYLSQLKDAHRSHPFIKEYQAKENDFDRLVLQYA PSA (SEQ ID NO:505), MAPPAPGPASGGSGEVDELFDVKNAFYIGSYQQCINEAXXVKLSSPER (SEQ ID NO:506), DVERDVFLYRAYLAQRKFGVVLDEIKPSSAPELQAVRMFADYLAHES (SEQ ID NO:507), RRDSIVAELDREMSRSXDVTNTTFLLMAASIYLHDQNPDAALRALHQG (SEQ ID NO:508), DSLECTAMTVQILLKLDRLDLARKELKRMQDLDEDATLTQLATAWVS (SEQ ID NO:509), LATGGEKLQDAYYIFQEMADKCSPTLLLLNGQAACHMAQGRWEAAEG (SEQ ID NO:510), LLQEALDKDSGYPETLVNLIVLSQHLGKPPEVTNRYLSQLKDAHRSHP (SEQ ID NO:511), FIKEYQAKENDFDRLVLQYAPSAEAGPELSGP (SEQ ID NO:512), RDVERDVFLYRAYLAQRKFGVVLDEIKPSSAPELQAVRMFADYLAHE (SEQ ID NO:513), SRRDSIVAELDREMSRSXDVTNTTFLLMAASIYLHDQNPDAALRALHQ (SEQ ID NO:514), GDSLECTAMTVQILLKLDRLDLARKELKRMQDLDEDATLTQLATAWV (SEQ ID NO:515), SLATGGEKLQDAYYIFQEMADKCSPTLLLLNGQAACHMAQGRWEAAE (SEQ ID NO:516), GLLQEALDKDSG YPETLVNLIVLSQHLGKPPEVTNRYL (SEQ ID NO:517), SQLKDAHRSHPFIKEYQAKENDFDRLVLQYAPSA (SEQ ID NO:518), or NRYYRESWSLQVPVRNSGSTHASERNGASGPRPGLRRLRGGRRAVRRKERL LHRQLPAVHKR (SEQ ID NO:519). Moreover, fragments and variants of these polypeptides (such as, for example, fragments as described herein, polypeptides at least 80%, 85%, 90%, 95%, 96%, 97%, 98%, or 99% identical to these polypeptides and polypeptides encoded by the polynucleotide which hybridizes, under stringent conditions, to the polynucleotide encoding these polypeptides) are encompassed by the invention. Antibodies that bind polypeptides of the invention are also encompassed by the invention. Polynucleotides encoding these polypeptides are also encompassed by the invention.

[0112] The gene encoding the disclosed cDNA is thought to reside on chromosome 19. Accordingly, polynucleotides of the invention are useful as a marker in linkage analysis for chromosome 19.

[0113] This gene is expressed primarily in activated monocytes and T-cells.

[0114] Polynucleotides and polypeptides of the invention are useful as reagents for differential identification of the tissue(s) or cell type(s) present in a biological sample and for diagnosis of diseases and conditions which include, but are not limited to, immunomodulation, specifically relating to transport problems in these cells. Similarly, polypeptides and antibodies directed to these polypeptides are useful in providing immunological probes for differential identification of the tissue(s) or cell type(s). For a number of disorders of the above tissues or cells, particularly of the immune system, expression of this gene at significantly higher or lower levels may be routinely detected in certain tissues or cell types (e.g. immune, cancerous and wounded tissues) or bodily fluids (e.g. lymph, serum, plasma, urine, synovial fluid and spinal fluid) or another tissue or cell sample taken from an individual having such a disorder, relative to the standard gene expression level, i.e., the expression level in healthy tissue or bodily fluid from an individual not having the disorder.

[0115] The tissue distribution in activated monocytes and T-cells combined with the homology to epsilon-COP indicates that the protein product of this gene is useful for treating and/or diagnosing problems with the cellular transport of proteins that may result in immunologic dysfunction. Furthermore, this gene product may be involved in the regulation of cytokine production, antigen presentation, or other processes that may also suggest a usefulness in the treatment of cancer (e.g. by boosting immune responses). Since the gene is expressed in cells of lymphoid origin, the gene or protein, as well as, antibodies directed against the protein may show utility as a tumor marker and/or immunotherapy targets for the above listed tissues.

[0116] Many polynucleotide sequences, such as EST sequences, are publicly available and accessible through sequence databases. Some of these sequences are related to SEQ ID NO:25 and may have been publicly available prior to conception of the present invention. Preferably, such related polynucleotides are specifically excluded from the scope of the present invention. To list every related sequence is cumbersome. Accordingly, preferably excluded from the present invention are one or more polynucleotides comprising a nucleotide sequence described by the general formula of a-b, where a is any integer between 1 to 1194 of SEQ ID NO:25, b is an integer of 15 to 1208, where both a and b correspond to the positions of nucleotide residues shown in SEQ ID NO:25, and where b is greater than or equal to a+14.

[0117] Features of Protein Encoded by Gene No: 16

[0118] The translation product of this gene shares sequence homology with an RNA helicase which is thought to be important in polynucleotide metabolism. The translation product of this contig exhibits good homology to the LbeIF4A antigen of Leishmania braziliensis. The LbeIF4A antigen, or immunogenic portions of it, can be used to induce protective immunity against leishmaniasis, specifically L. donovani, L. chagasi, L. infantum, L. major, L. braziliensis, L. panamensis, L. tropica and L. guyanensis. It can also be used diagnostically to detect Leishmania infection or to stimulate a cellular and/or humoral immune response or to stimulate the production of interleukin-12. The gene encoding the disclosed cDNA is thought to reside on chromosome 7. Accordingly, polynucleotides related to this invention are useful as a marker in linkage analysis for chromosome 7.

[0119] This gene is expressed primarily in colon cancer, and to a lesser extent, in pituitary.

[0120] Polynucleotides and polypeptides of the invention are useful as reagents for differential identification of the tissue(s) or cell type(s) present in a biological sample and for diagnosis of cancers particularly of the colon. Similarly, polypeptides and antibodies directed to these polypeptides are useful in providing immunological probes for differential identification of the tissue(s) or cell type(s). For a number of disorders of the above tissues or cells, particularly of the gastrointestinal system, expression of this gene at significantly higher or lower levels may be routinely detected in certain tissues or cell types (e.g. colon, pituitary, cancerous and wounded tissues) or bodily fluids (e.g. lymph, serum, plasma, urine, synovial fluid and spinal fluid) or another tissue or cell sample taken from an individual having such a disorder, relative to the standard gene expression level, i.e., the expression level in healthy tissue or bodily fluid from an individual not having the disorder.

[0121] Predicted epitopes include those comprising a sequence shown in SEQ ID NO:264 as residues: Glu-93 to Ala-98, Gln-150 to Leu-156, Leu-220 to Leu-231, Leu-268 to Arg-273, Val-324 to Pro-341, Arg-372 to Asn-380, Ser-405 to Gly-410, Phe-426 to Ala-433, Glu-458 to Asp-470, and/or Arg-506 to Ser-547.

[0122] The tissue distribution in colon cancer, combined with the homology to RNA helicase indicates that the protein product of this gene is useful for the development of diagnostic tests for colon cancer or other gastrointestinal or metabolic disorders. Protein, as well as, antibodies directed against the protein may show utility as a tissue-specific marker and/or immunotherapy target for the above listed tissues.

[0123] Many polynucleotide sequences, such as EST sequences, are publicly available and accessible through sequence databases. Some of these sequences are related to SEQ ID NO:26 and may have been publicly available prior to conception of the present invention. Preferably, such related polynucleotides are specifically excluded from the scope of the present invention. To list every related sequence is cumbersome. Accordingly, preferably excluded from the present invention are one or more polynucleotides comprising a nucleotide sequence described by the general formula of a-b, where a is any integer between 1 to 1908 of SEQ ID NO:26, b is an integer of 15 to 1922, where both a and b correspond to the positions of nucleotide residues shown in SEQ ID NO:26, and where b is greater than or equal to a+14.

[0124] Features of Protein Encoded by Gene No: 17

[0125] The translation product of this contig has sequence homology to a cytoplasmic protein that binds specifically to JNK, designated the JNK interacting protein-1 or JIP-1 in Mus musculus. JIP-1 caused cytoplasmic retention of JNK and inhibition of JNK-regulated gene expression. The gene encoding the disclosed cDNA is thought to reside on chromosome 11. Accordingly, polynucleotides related to this invention are useful as a marker in linkage analysis for chromosome 11.

[0126] In specific embodiments, polypeptides of the invention comprise, or alternatively consists of, an amino acid sequence selected from the group:

(SEQ ID NO:520)

APGXGWRGSLGEPPPPPRASLSSDTSALSYDSVKYTLVVDEHAQLELVSL
RRASETTVTRVTLPPS,

(SEQ ID NO:521)

APGXGWRGSLGEPPPPPRASLSSDTSALSY,
or

(SEQ ID NO:522)

DSVKYTLVVDEHAQLELVSLRRASETTVTRVTLPPS.

[0127] Moreover, fragments and variants of these polypeptides (such as, for example, fragments as described herein, polypeptides at least 80%, 85%, 90%, 95%, 96%, 97%, 98%, or 99% identical to these polypeptides and polypeptides encoded by the polynucleotide which hybridizes, under stringent conditions, to the polynucleotide encoding these polypeptides) are encompassed by the invention. Antibodies that bind polypeptides of the invention are also encompassed by the invention. Polynucleotides encoding these polypeptides are also encompassed by the invention.

[0128] This gene is expressed primarily in brain, including pituitary, cerebellum, frontal cortex, and fetal brain, and to a lesser extent in the cortex or the kidney.

[0129] Polynucleotides and polypeptides of the invention are useful as reagents for differential identification of the tissue(s) or cell type(s) present in a biological sample and for diagnosis of the central nervous system disorders including ischemia, epilepsy, Parkinson's disease, and schizophrenia. Similarly, polypeptides and antibodies directed to these polypeptides are useful in providing immunological probes for differential identification of the tissue(s) or cell type(s). For a number of disorders of the above tissues or cells, particularly of the central nervous system, expression of this gene at significantly higher or lower levels may be routinely detected in certain tissues or cell types (e.g. brain, kidney, cancerous and wounded tissues) or bodily fluids (e.g. lymph, serum, plasma, urine, synovial fluid and spinal fluid) or another tissue or cell sample taken from an individual having such a disorder, relative to the standard gene expression level, i.e., the expression level in healthy tissue or bodily fluid from an individual not having the disorder. Furthermore, the translation product of this contig may suppress the effects of the JNK signaling pathway on cellular proliferation, including transformation by the Bcr-Ab1 oncogene.

[0130] Predicted epitopes include those comprising a sequence shown in SEQ ID NO:265 as residues: Pro-6 to Ser-26, Ala-30 to Asp-41, Gly-55 to Ser-61, Gly-74 to Thr-80, Tyr-117 to Ala-123, Tyr-167 to Asp-172, Ala-212 to Cys-223, and/or Pro-239 to Tyr-244.

[0131] The tissue distribution in brain indicates that the protein product of this gene is useful for the enhanced survival and/or differentiation of neurons as a treatment for neurodegenerative disease. Furthermore, the tissue distribution indicates that the translation product of this gene may be involved in neuronal survival; synapse formation; conductance; neural differentiation, etc. Such involvement may impact many processes, such as learning and cognition. It may also be useful in the treatment of such neurodegenerative disorders as schizophrenia; ALS; or Alzheimer's.

[0132] Many polynucleotide sequences, such as EST sequences, are publicly available and accessible through sequence databases. Some of these sequences are related to SEQ ID NO:27 and may have been publicly available prior to conception of the present invention. Preferably, such related polynucleotides are specifically excluded from the scope of the present invention. To list every related sequence is cumbersome. Accordingly, preferably excluded from the present invention are one or more polynucleotides comprising a nucleotide sequence described by the general formula of a-b, where a is any integer between 1 to 1937 of SEQ ID NO:27, b is an integer of 15 to 1951, where both a and b correspond to the positions of nucleotide residues shown in SEQ ID NO:27, and where b is greater than or equal to a+14.

[0133] Features of Protein Encoded by Gene No: 18

[0134] The translation product of this gene shares sequence homology with a liver stage antigen from a protozoan parasite.

[0135] This gene is expressed primarily in fetal tissue, and to a lesser extent, in activated T-cells and other immune cells.

[0136] Polynucleotides and polypeptides of the invention are useful as reagents for differential identification of the tissue(s) or cell type(s) present in a biological sample and for diagnosis of diseases and conditions which include, but are not limited to, developmental abnormalities and diseases of immune function. Similarly, polypeptides and antibodies directed to these polypeptides are useful in providing immunological probes for differential identification of the tissue(s) or cell type(s). For a number of disorders of the above tissues or cells, particularly of the immune system, expression of this gene at significantly higher or lower levels may be routinely detected in certain tissues or cell types (e.g. immune, cancerous and wounded tissues) or bodily fluids (e.g. lymph, serum, plasma, urine, synovial fluid and spinal fluid) or another tissue or cell sample taken from an individual having such a disorder, relative to the standard gene expression level, i.e., the expression level in healthy tissue or bodily fluid from an individual not having the disorder.

[0137] The tissue distribution in T-cells, combined with the homology to a protozoan antigen indicates that the protein product of this gene is useful for the treatment and/or immune modulation of parasitic infections. Furthermore, expression of this gene product in T cells also strongly indicates a role for this protein in immune function and immune surveillance.

[0138] Many polynucleotide sequences, such as EST sequences, are publicly available and accessible through sequence databases. Some of these sequences are related to SEQ ID NO:28 and may have been publicly available prior to conception of the present invention. Preferably, such related polynucleotides are specifically excluded from the scope of the present invention. To list every related sequence is cumbersome. Accordingly, preferably excluded from the present invention are one or more polynucleotides comprising a nucleotide sequence described by the general formula of a-b, where a is any integer between 1 to 3975 of SEQ ID NO:28, b is an integer of 15 to 3989, where both a and b correspond to the positions of nucleotide residues shown in SEQ ID NO:28, and where b is greater than or equal to a+14.

[0139] Features of Protein Encoded by Gene No: 19

[0140] In specific embodiments, polypeptides of the invention comprise, or alternatively consists of, an amino acid sequence selected from the group:

(SEQ ID NO:523)

MKAIGIEPSLATYHHIIRLFDQPGDPLKRSSFIIYDIMNELMGKRFSPKD
PDDDKFFQSAMSICSSLRDLELAYQVHGLLKTGDNWKFIGPDQHRNFYYS
KFFDLICLMEQIDVTLKWYEDLIPSAYFPHSQTMIHLLQALDVANRLEVI
PKIWER,

(SEQ ID NO:524)

KDSKEYGHTFRSDLREEILMLMARDKHPPELQVAFADCAADIKSAYESQP
IRQTAQDWPATSLNCIAILFLRAGRTQEAWKMLGLFRKHNKIPRSELLNE
LMDSAKVSNSPSQAIEVVELASAFSLPICEGLTQRVMSDFAINQEQKEAL
SNLTALTSDSDTDSSSDSDSDTSEGK,

(SEQ ID NO:525)

MKAIGIEPSLATYHHIIRLFDQPGDPLKRSSFIIYDIMNELMGKRFSPK,

(SEQ ID NO:526)

DPDDDKFFQSAMSICSSLRDLELAYQVHGLLKTGDNWKFIGPDQHRNFY,

(SEQ ID NO:527)

YSKFFDLICLMEQIDVTLKWYEDLIPSA,

(SEQ ID NO:528)

YFPHSQTMIHLLQALDVANRLEVIPKIWER,

(SEQ ID NO:529)

KDSKEYGHTFRSDLREEILMLMARDKHPPELQVAFADCAADIKSAY,

(SEQ ID NO:530)

ESQPIRQTAQDWPATSLNCIAILFLRAGRTQEAWKMLGLFRKHNKTPRS
E,

(SEQ ID NO:531)

LLNELMDSAKVSNSPSQAIEVVELASAFSLPICEGLTQRVMSDFAIN,
or

(SEQ ID NO:532)

QEQKEALSNLTALTSDSDTDSSSDSDSDTSEGK.

[0141] Moreover, fragments and variants of these polypeptides (such as, for example, fragments as described herein, polypeptides at least 80%, 85%, 90%, 95%, 96%, 97%, 98%, or 99% identical to these polypeptides and polypeptides encoded by the polynucleotide which hybridizes, under stringent conditions, to the polynucleotide encoding these polypeptides) are encompassed by the invention. Antibodies that bind polypeptides of the invention are also encompassed by the invention. Polynucleotides encoding these polypeptides are also encompassed by the invention.

[0142] The gene encoding the disclosed cDNA is thought to reside on chromosome 2. Accordingly, polynucleotides related to this invention are useful as a marker in linkage analysis for chromosome 2.

[0143] This gene is expressed primarily in stromal and CD34 depleted bone marrow cells, and to a lesser extent in tissues of embryonic origin.

[0144] Polynucleotides and polypeptides of the invention are useful as reagents for differential identification of the tissue(s) or cell type(s) present in a biological sample and for diagnosis of diseases and conditions which include, but are not limited to, diseases of hematopoietic origin including cancers and immune dysfunction. Similarly, polypeptides and antibodies directed to these polypeptides are useful in providing immunological probes for differential identification of the tissue(s) or cell type(s). For a number of disorders of the above tissues or cells, particularly of the hematopoietic and immune systems, expression of this gene at significantly higher or lower levels may be routinely detected in certain tissues or cell types (e.g. immune, cancerous and wounded tissues) or bodily fluids (e.g. lymph, serum, plasma, urine, synovial fluid and spinal fluid) or another tissue or cell sample taken from an individual having such a disorder, relative to the standard gene expression level, i.e., the expression level in healthy tissue or bodily fluid from an individual not having the disorder.

[0145] Predicted epitopes include those comprising a sequence shown in SEQ ID NO:267 as residues: Ser-28 to Gln-34.

[0146] The tissue distribution in stromal and CD34 depleted bone marrow cells indicates that the protein product of this gene is useful as a growth factor for hematopoietic stem cells or progenitor cells which may be useful in the treatment of chemotherapy patients suffering from neutropenia. Furthermore, the tissue distribution indicates that the protein product of this gene is useful for the treatment and diagnosis of hematopoetic related disorders such as aremia, pancytopenia, leukopenia, thrombocytopenia or leukemia, since stromal cells are important in the production of cells of hematopoietic lineages. The uses include bone marrow cell ex vivo culture, bone marrow transplantation, bone marrow reconstitution, radiotherapy or chemotherapy of neoplasia. The gene product may also be involved in lymphopoiesis, therefore, it can be used in immune disorders such as infection, inflammation, allergy, immunodeficiency etc. In addition, this gene product may have commercial utility in the expansion of stem cells and committed progenitors of various blood lineages, and in the differentiation and/or proliferation of various cell types.

[0147] Many polynucleotide sequences, such as EST sequences, are publicly available and accessible through sequence databases. Some of these sequences are related to SEQ ID NO:29 and may have been publicly available prior to conception of the present invention. Preferably, such related polynucleotides are specifically excluded from the scope of the present invention. To list every related sequence is cumbersome. Accordingly, preferably excluded from the present invention are one or more polynucleotides comprising a nucleotide sequence described by the general formula of a-b, where a is any integer between 1 to 3721 of SEQ ID NO:29, b is an integer of 15 to 3735, where both a and b correspond to the positions of nucleotide residues shown in SEQ ID NO:29, and where b is greater than or equal to a+14.

[0148] Features of Protein Encoded by Gene No: 20

[0149] In specific embodiments, polypeptides of the invention comprise, or alternatively consists of, an amino acid sequence selected from the group: MSSDNESDIEDEDLKLELRRLRDKHLKEIQDLQSRQKHEIESLYTKLGKVPPA VIIPPAAPLSGRRRRPTKSKGSKSSRSSSLGNKSPQLSGNLSGQSAASVLHPQQ TLHPPGNIPESGQNQLLQPLKPSPSSDNLYSAFTSDGAISVPSLSAPGQGTSSTN TVGATVNSQAAQAQPPAMTSSRKGTFTDDLHKLVDNWARDAMNLSGRRGS KGHMNYEGPGMARKFSAPGQLCISMTSNLGGSAPISAASATSLGHFTKSMCP PQQYGFPATPFGAQWSGTGGPAPQPLGQFQPVGTASLQNFNISNLQKSISNPP GSNLRTT (SEQ ID NO:533), IQDLQSRQKHEIESLYTKLGKVPPAVIIPPAAPLSGRRRRPTKSKGSKSSRSSSL GNKSPQLSGNLSGQSAASVLHPQQTLHPPGNIPESGQNQLLQPLKPSPSSDNL YSAFTSDGAISVPSLSAPGQGT SST (SEQ ID NO:534), TSDGAISVPSLSAPGQGTSSTNTVGATVNSQAAQAQPPAMTSSRKGTFTDDL H (SEQ ID NO:535), KGHMNYEGPGMARKFSAPGQLCISMTSNLGGSAPISAASATSLGHFTK (SEQ ID NO:536), QPLKPSPSSDNL YSAFTSDGAISVPSLSAPG (SEQ ID NO:537), MSSDNESDIEDEDLKLELRRLRD KHLKEIQDLQSRQKHEIESLYTKLGKVP (SEQ ID NO:538), PAVIIPPAAPLSGRRRRPTKSKGSKSSRSSSLGNKSPQLSGNLSGQS (SEQ ID NO:539), AASVLHPQQTLHPPGNIPESGQNQLLQPLKPSPSSDNLYSAFTSDGAISV (SEQ ID NO:540), PSLSAPGQGTSSTNTVGATVNSQAAQAQPPAMTSSRKGTFTDDL (SEQ ID NO:541), HKLVDNWARDAMNLSGRRGSKGHMNYEGPGMARKFSAPGQLCISMT (SEQ ID NO:542), SNLGGSAPISAASATSLGHFTKSMCPPQQYGFPATPFGAQWSGTGG (SEQ ID NO:543), and PAPQPLGQFQPVGTASLQNFNISNLQKSISNPPGSNLRTT (SEQ ID NO:544). Moreover, fragments and variants of these polypeptides (such as, for example, fragments as described herein, polypeptides at least 80%, 85%, 90%, 95%, 96%, 97%, 98%, or 99% identical to these polypeptides and polypeptides encoded by the polynucleotide which hybridizes, under stringent conditions, to the polynucleotide encoding these polypeptides) are encompassed by the invention. Antibodies that bind polypeptides of the invention are also encompassed by the invention. Polynucleotides encoding these polypeptides are also encompassed by the invention.

[0150] This gene is expressed in fetal liver and tissues associated with the CNS.

[0151] Polynucleotides and polypeptides of the invention are useful as reagents for differential identification of the tissue(s) or cell type(s) present in a biological sample and for diagnosis of diseases and conditions which include, but are not limited to, liver and CNS diseases. Similarly, polypeptides and antibodies directed to these polypeptides are useful in providing immunological probes for differential identification of the tissue(s) or cell type(s). For a number of disorders of the above tissues or cells, particularly of the liver and CNS, expression of this gene at significantly higher or lower levels may be routinely detected in certain tissues or cell types (e.g. liver, cancerous and wounded tissues) or bodily fluids (e.g. lymph, serum, plasma, urine, synovial fluid and spinal fluid) or another tissue or cell sample taken from an individual having such a disorder, relative to the standard gene expression level, i.e., the expression level in healthy tissue or bodily fluid from an individual not having the disorder.

[0152] Predicted epitopes include those comprising a sequence shown in SEQ ID NO:268 as residues: Gln-26 to Lys-34.

[0153] The tissue distribution in fetal liver and neural tissues indicates that the protein product of this gene is useful for the diagnosis and treatment for liver diseases such as hepatocellular carcinomas and diseases of the CNS. Furthermore, the tissue distribution indicates that the protein product of this gene is useful for the detection and treatment of liver disorders and cancers (e.g. hepatoblastoma, jaundice, hepatitis, liver metabolic diseases and conditions that are attributable to the differentiation of hepatocyte progenitor cells), as well as the detection and treatment of neurodegenerative disease states and behavioral disorders such as Alzheimer's Disease, Parkinson's Disease, Huntington's Disease, Tourette's Syndrome, schizophrenia, mania, dementia, paranoia, obsessive compulsive disorder, panic disorder, learning disabilities, ALS, psychoses, autism, and altered behaviors, including disorders in feeding, sleep patterns, balance, and, perception.

[0154] Many polynucleotide sequences, such as EST sequences, are publicly available and accessible through sequence databases. Some of these sequences are related to SEQ ID NO:30 and may have been publicly available prior to conception of the present invention. Preferably, such related polynucleotides are specifically excluded from the scope of the present invention. To list every related sequence is cumbersome. Accordingly, preferably excluded from the present invention are one or more polynucleotides comprising a nucleotide sequence described by the general formula of a-b, where a is any integer between 1 to 1653 of SEQ ID NO:30, b is an integer of 15 to 1667, where both a and b correspond to the positions of nucleotide residues shown in SEQ ID NO:30, and where b is greater than or equal to a+14.

[0155] Features of Protein Encoded by Gene No: 21

[0156] The translation product of this gene shows sequence homology to two recently cloned genes, karyopherin beta 3 and Ran_GTP binding protein 5. (See Genbank Accession Nos. gi|2102696 and gn1|PID|e328731.) The Ran_GTP binding protein is related to importin-beta, the key mediator of nuclear localization signal (NLS)-dependent nuclear transport. Based on homology, it is likely that this gene may demonstrate activity similar to the RAN_GTP binding protein.

[0157] In specific embodiments, polypeptides of the invention comprise, or alternatively consists of, the following amino acid sequence: VRVAAAESMXLLLECAXVRGPEYLTQMWHFMCDALIKAIGTEPDSDVLSEI MHSFAK (SEQ ID NO:545). Moreover, fragments and variants of this polypeptide (such as, for example, fragments as described herein, polypeptides at least 80%, 85%, 90%, 95%, 96%, 97%, 98%, or 99% identical to these polypeptides and polypeptides encoded by the polynucleotide which hybridize, under stringent conditions, to the polynucleotide encoding this polypeptide are encompassed by the invention. Antibodies that bind polypeptides of the invention are also encompassed by the invention. Polynucleotides encoding this polypeptide are also encompassed by the invention.

[0158] This gene is expressed in thymus tissue, and to a lesser extent in stromal cells.

[0159] Polynucleotides and polypeptides of the invention are useful as reagents for differential identification of the tissue(s) or cell type(s) present in a biological sample and for diagnosis of diseases and conditions which include, but are not limited to, immune disorders. Similarly, polypeptides and antibodies directed to these polypeptides are useful in providing immunological probes for differential identification of the tissue(s) or cell type(s). For a number of disorders of the above tissues or cells, particularly of the immune system, expression of this gene at significantly higher or lower levels may be routinely detected in certain tissues or cell types (e.g. immune, thymus, cancerous and wounded tissues) or bodily fluids (e.g. lymph, serum, plasma, urine, synovial fluid and spinal fluid) or another tissue or cell sample taken from an individual having such a disorder, relative to the standard gene expression level, i.e., the expression level in healthy tissue or bodily fluid from an individual not having the disorder.

[0160] The tissue distribution in thymus indicates that the protein product of this gene is useful for the diagnosis and treatment for immune disorders. Furthermore, the polypeptides or polynucleotides of the present invention are also useful in the treatment, prophylaxis, and detection of thymus disorders, such as Graves Disease, lymphocytic thyroiditis, hyperthyroidism, and hypothyroidism. Additionally, the tissue distribution indicates that the protein product of this gene is useful for the treatment and diagnosis of hematopoetic related disorders such as anemia, pancytopenia, leukopenia, thrombocytopenia or leukemia, since stromal cells are important in the production of cells of hematopoietic lineages. The uses include bone marrow cell ex vivo culture, bone marrow transplantation, bone marrow reconstitution, radiotherapy or chemotherapy of neoplasia. The gene product may also be involved in lymphopoiesis, therefore, it can be used in immune disorders such as infection, inflammation, allergy, immunodeficiency etc. In addition, this gene product may have commercial utility in the expansion of stem cells and committed progenitors of various blood lineages, and in the differentiation and/or proliferation of various cell types.

[0161] Many polynucleotide sequences, such as EST sequences, are publicly available and accessible through sequence databases. Some of these sequences are related to SEQ ID NO:31 and may have been publicly available prior to conception of the present invention. Preferably, such related polynucleotides are specifically excluded from the scope of the present invention. To list every related sequence is cumbersome. Accordingly, preferably excluded from the present invention are one or more polynucleotides comprising a nucleotide sequence described by the general formula of a-b, where a is any integer between 1 to 1394 of SEQ ID NO:31, b is an integer of 15 to 1408, where both a and b correspond to the positions of nucleotide residues shown in SEQ ID NO:31, and where b is greater than or equal to a+14.

[0162] Features of Protein Encoded by Gene No: 22

[0163] The translation product of this gene shares sequence homology with a natural resistance-associated macrophage protein 2 from Homo sapiens (gi|3152690 (AF064484)), which is thought to function as a macrophage-specific membrane transport protein. This gene is expressed primarily in prostate and osteoclastoma tissues. In specific embodiments, polypeptides of the invention comprise, or alternatively consists of, an amino acid sequence selected from the group: MEINNQNCFIVIDLVRTVMENGVEGLLIFGAFLPESWLIGVRCSSEPPKALLLIL AHSQKRRLDGWSFIRHLRVHYCVSLTIHFS (SEQ ID NO:546), GGREANKXFFIESCIALFVSFIINVFVVSVFAEXFFGXTNEQVVEVCTNTSSPH AGLFPKDNSTLAVDIYKGGVVLGCYFGPAALYIWAVGILAAGQSST (SEQ ID NO:547), GGREANKXFFIESCIALFVSFIINVFVVSVFAEXFFGXTNEQVVE (SEQ ID NO:548), and/or VCTNTSSPHAGLFPKDNSTLAVDTYKGGVVLGCYFGPAALYIWAVGILAAGQ SST (SEQ ID NO:549). Moreover, fragments and variants of these polypeptides (such as, for example, fragments as described herein, polypeptides at least 80%, 85%, 90%, 95%, 96%, 97%, 98%, or 99% identical to these polypeptides and polypeptides encoded by the polynucleotide which hybridizes, under stringent conditions, to the polynucleotide encoding these polypeptides) are encompassed by the invention. Antibodies that bind polypeptides of the invention are also encompassed by the invention. Polynucleotides encoding these polypeptides are also encompassed by the invention.

[0164] The gene encoding the disclosed cDNA is thought to reside on chromosome 12. Accordingly, polynucleotides related to this invention are useful as a marker in linkage analysis for chromosome 12.

[0165] This gene is expressed primarily in fetal liver/spleen, fetal brain, and to a lesser extent in placenta.

[0166] Polynucleotides and polypeptides of the invention are useful as reagents for differential identification of the tissue(s) or cell type(s) present in a biological sample and for diagnosis of diseases and conditions which include, but are not limited to, immune, developmental, hepatic, or bone and prostate diseases, and cancers, particularly of the bone and prostate. Similarly, polypeptides and antibodies directed to these polypeptides are useful in providing immunological probes for differential identification of the tissue(s) or cell type(s). For a number of disorders of the above tissues or cells, particularly of the bone and prostate systems, expression of this gene at significantly higher or lower levels may be routinely detected in certain tissues or cell types (e.g. bone, prostate, cancerous and wounded tissues) or bodily fluids (e.g. lymph, serum, plasma, urine, synovial fluid and spinal fluid) or another tissue or cell sample taken from an individual having such a disorder, relative to the standard gene expression level, i.e., the expression level in healthy tissue or bodily fluid from an individual not having the disorder.

[0167] The tissue distribution in bone indicates that the protein product of this gene is useful for the diagnosis and treatment of bone and prostate disorders, especially cancers of those systems. Elevated levels of expression of this gene product in osteoclastoma indicates that it may play a role in the survival, proliferation, and/or growth of osteoclasts. Therefore, it may be useful in influencing bone mass in such conditions as osteoporosis. Moreover, the protein product of this gene is useful for the treatment and diagnosis of hematopoietic related disorders such as anemia, pancytopenia, leukopenia, thrombocytopenia or leukemia since stromal cells are important in the production of cells of hematopoietic lineages. The uses include bone marrow cell ex vivo culture, bone marrow transplantation, bone marrow reconstitution, radiotherapy or chemotherapy of neoplasia. The gene product may also be involved in lymphopoiesis, therefore, it can be used in immune disorders such as infection, inflammation, allergy, immunodeficiency etc. In addition, this gene product may have commercial utility in the expansion of stem cells and committed progenitors of various blood lineages, and in the differentiation and/or proliferation of various cell types. Protein, as well as, antibodies directed against the protein may show utility as a tumor marker and/or immunotherapy targets for the above listed tissues.

[0168] Many polynucleotide sequences, such as EST sequences, are publicly available and accessible through sequence databases. Some of these sequences are related to SEQ ID NO:32 and may have been publicly available prior to conception of the present invention. Preferably, such related polynucleotides are specifically excluded from the scope of the present invention. To list every related sequence is cumbersome. Accordingly, preferably excluded from the present invention are one or more polynucleotides comprising a nucleotide sequence described by the general formula of a-b, where a is any integer between 1 to 3172 of SEQ ID NO:32, b is an integer of 15 to 3186, where both a and b correspond to the positions of nucleotide residues shown in SEQ ID NO:32, and where b is greater than or equal to a+14.

[0169] Features of Protein Encoded by Gene No: 23

[0170] This gene shares sequence homology with the FK5106-binding protein (FKBP-13) family, a known cytosolic receptor for the immunosuppressants FK506 and rapamycin. Recently, another group has cloned a very similar gene, recognizing the homology to the FK506-binding protein family, calling their gene FKBP23 (See Genbank Accession No. 2827255.). Contact of cells with supernatant expressing the product of this gene increases the permeability of both prostate stromal cells and dermal fibroblasts to calcium. Thus, it is likely that the product of this gene is involved in a signal transduction pathway that is initiated when the product of this gene binds receptors on the surface of stromal cells and dermal fibroblast cells. Thus, polynucleotides and polypeptides have uses which include, but are not limited to, activating stromal and fibroblast cells.

[0171] This gene is expressed primarily in lymphoid tissues and stromal cells.

[0172] Polynucleotides and polypeptides of the invention are useful as reagents for differential identification of the tissue(s) or cell type(s) present in a biological sample, especially for those susceptible to immune suppressant therapies and for diagnosis of diseases and conditions which include, but are not limited to, immune suppressant disorders. Similarly, polypeptides and antibodies directed to these polypeptides are useful in providing immunological probes for differential identification of the tissue(s) or cell type(s). For a number of disorders of the above tissues or cells, particularly of the immune system, expression of this gene at significantly higher or lower levels may be routinely detected in certain tissues or cell types (e.g. immune, cancerous and wounded tissues) or bodily fluids (e.g. lymph, serum, plasma, urine, synovial fluid and spinal fluid) or another tissue or cell sample taken from an individual having such a disorder, relative to the standard gene expression level, i.e., the expression level in healthy tissue or bodily fluid from an individual not having the disorder.

[0173] Predicted epitopes include those comprising a sequence shown in SEQ ID NO:271 as residues: Ala-19 to Val-31, Arg-38 to Gly-49, Ala-61 to Lys-66, Tyr-68 to Pro-78, Gly-116 to Ala-121, Asp-154 to Ser-162, Glu-173 to Gln-186, Phe-194 to Gly-203, and/or Pro-207 to Val-212.

[0174] The tissue distribution in lymphoid tissues and stromal cells, the biological activity data, combined with the homology to FKBP-12 and -13 indicates that the protein product of this gene is useful for the diagnosis and treatment of immune suppressant disorders.

[0175] Many polynucleotide sequences, such as EST sequences, are publicly available and accessible through sequence databases. Some of these sequences are related to SEQ ID NO:33 and may have been publicly available prior to conception of the present invention. Preferably, such related polynucleotides are specifically excluded from the scope of the present invention. To list every related sequence is cumbersome. Accordingly, preferably excluded from the present invention are one or more polynucleotides comprising a nucleotide sequence described by the general formula of a-b, where a is any integer between 1 to 957 of SEQ ID NO:33, b is an integer of 15 to 971, where both a and b correspond to the positions of nucleotide residues shown in SEQ ID NO:33, and where b is greater than or equal to a+14.

[0176] Features of Protein Encoded by Gene No: 24

[0177] The gene encoding the disclosed cDNA is thought to reside on chromosome 8. Accordingly, polynucleotides related to this invention are useful as a marker in linkage analysis for chromosome 8.

[0178] This gene is expressed primarily in the brain and in the retina.

[0179] Polynucleotides and polypeptides of the invention are useful as reagents for differential identification of the tissue(s) or cell type(s) present in a biological sample and for diagnosis of diseases and conditions which include, but are not limited to, neurological and ocular associated disease states. Similarly, polypeptides and antibodies directed to these polypeptides are useful in providing immunological probes for differential identification of the tissue(s) or cell type(s). For a number of disorders of the above tissues or cells, particularly of the disorders of the central nervous system, expression of this gene at significantly higher or lower levels may be routinely detected in certain tissues or cell types (e.g. brain, cancerous and wounded tissues) or bodily fluids (e.g. lymph, serum, plasma, urine, synovial fluid and spinal fluid) or another tissue or cell sample taken from an individual having such a disorder, relative to the standard gene expression level, i.e., the expression level in healthy tissue or bodily fluid from an individual not having the disorder.

[0180] Predicted epitopes include those comprising a sequence shown in SEQ ID NO:272 as residues: Cys-34 to Asp-40.

[0181] The tissue distribution in retina indicates that the protein product of this gene is useful for the treatment and/or detection of eye disorders including blindness, color blindness, impaired vision, short and long sightedness, retinitis pigmentosa, retinitis proliferans, and retinoblastoma. Expression in the brain indicates a role in the is useful for the detection/treatment of neurodegenerative disease states and behavioral disorders such as Alzheimer's Disease, Parkinson's Disease, Huntington's Disease, schizophrenia, mania, dementia, paranoia, obsessive compulsive disorder and panic disorder.

[0182] Many polynucleotide sequences, such as EST sequences, are publicly available and accessible through sequence databases. Some of these sequences are related to SEQ ID NO:34 and may have been publicly available prior to conception of the present invention. Preferably, such related polynucleotides are specifically excluded from the scope of the present invention. To list every related sequence is cumbersome. Accordingly, preferably excluded from the present invention are one or more polynucleotides comprising a nucleotide sequence described by the general formula of a-b, where a is any integer between 1 to 1778 of SEQ ID NO:34, b is an integer of 15 to 1792, where both a and b correspond to the positions of nucleotide residues shown in SEQ ID NO:34, and where b is greater than or equal to a+14.

[0183] Features of Protein Encoded by Gene No: 25

[0184] This gene shows sequence homology to a newly identified class of proteins expressed in the nervous system, called stathmin family. (See Genbank Accession No. 2585991; see also Eur. J. Biochem. 248 (3), 794-806 (1997).) The stathmin family appears to be an ubiquitous phosphoprotein involved as a relay integrating various intracellular signaling pathways. These pathways affect cell proliferation and differentiation.

[0185] In specific embodiments, polypeptides of the invention comprise, or alternatively consists of, an amino acid sequence selected from the group: QDKHAEEVRKNKELKEEASR (SEQ ID NO:550), QQDLSPWAAPVGCPLXXASXTCHXLPLSGCLRRQSXSLPVVAXLCFWFSCPL ASLFVPGQPCVTCPFPSLPFQDKHAEEVRKNKELKEEASR (SEQ ID NO:551). Moreover, fragments and variants of these polypeptides (such as, for example, fragments as described herein, polypeptides at least 80%, 85%, 90%, 95%, 96%, 97%, 98%, or 99% identical to these polypeptides and polypeptides encoded by the polynucleotide which hybridizes, under stringent conditions, to the polynucleotide encoding these polypeptides) are encompassed by the invention. Antibodies that bind polypeptides of the invention are also encompassed by the invention. Polynucleotides encoding these polypeptides are also encompassed by the invention.

[0186] This gene is expressed highly in brain tissues.

[0187] Polynucleotides and polypeptides of the invention are useful as reagents for differential identification of the tissue(s) or cell type(s) present in a biological sample and for diagnosis of diseases and conditions which include, but are not limited to, neurological disorders. Similarly, polypeptides and antibodies directed to these polypeptides are useful in providing immunological probes for differential identification of the tissue(s) or cell type(s). For a number of disorders of the above tissues or cells, particularly of the central nervous system, expression of this gene at significantly higher or lower levels may be routinely detected in certain tissues or cell types (e.g. brain, cancerous and wounded tissues) or bodily fluids (e.g. lymph, serum, plasma, urine, synovial fluid and spinal fluid) or another tissue or cell sample taken from an individual having such a disorder, relative to the standard gene expression level, i.e., the expression level in healthy tissue or bodily fluid from an individual not having the disorder.

[0188] The tissue distribution in brain indicates that the protein product of this gene is useful for the detection/treatment of neurodegenerative disease states and behavioral disorders such as Alzheimer's Disease, Parkinson's Disease, Huntington's Disease, schizophrenia, mania, dementia, paranoia, obsessive compulsive disorder and panic disorder.

[0189] Many polynucleotide sequences, such as EST sequences, are publicly available and accessible through sequence databases. Some of these sequences are related to SEQ ID NO:35 and may have been publicly available prior to conception of the present invention. Preferably, such related polynucleotides are specifically excluded from the scope of the present invention. To list every related sequence is cumbersome. Accordingly, preferably excluded from the present invention are one or more polynucleotides comprising a nucleotide sequence described by the general formula of a-b, where a is any integer between 1 to 882 of SEQ ID NO:35, b is an integer of 15 to 896, where both a and b correspond to the positions of nucleotide residues shown in SEQ ID NO:35, and where b is greater than or equal to a+14.

[0190] Features of Protein Encoded by Gene No,: 26

[0191] The polynucleotide sequence of this gene contains a domain similar to a Flt3 ligand peptide.

[0192] In specific embodiments, polypeptides of the invention comprise, or alternatively consists of, the following amino acid sequence: PTRCCTTQPCRSSARRPCWVPMVPSPEGREXQPTCPS (SEQ ID NO:552). Moreover, fragments and variants of this polypeptide (such as, for example, fragments as described herein, polypeptides at least 80%, 85%, 90%, 95%, 96%, 97%, 98%, or 99% identical to these polypeptides and polypeptides encoded by the polynucleotide which hybridize, under stringent conditions, to the polynucleotide encoding this polypeptide are encompassed by the invention. Antibodies that bind polypeptides of the invention are also encompassed by the invention. Polynucleotides encoding this polypeptide are also encompassed by the invention.

[0193] This gene may have activity as binding to Flt3 receptors, a process known to promote angiogenesis and/or lymphangiogenesis.

[0194] This gene is expressed in human tonsil, and to a lesser extent in teratocarcinoma, placenta, colon carcinoma, and fetal kidney.

[0195] Therefore, polynucleotides and polypeptides of the invention are useful as reagents for identification of the tissue(s) or cell type(s) present in a biological sample and for diagnosis of diseases and conditions which include, but are not limited to, diseases of the tonsil, as well as cancers, such as colon, reproductive, and kidney cancers. Similarly, polypeptides and antibodies directed to these polypeptides are useful in providing immunological probes for differential identification of the tissue(s) or cell type(s). For a number of disorders of the above tissues or cells, particularly of the tonsils, colon, reproductive organs, and kidneys, expression of this gene at significantly higher or lower levels may be routinely detected in certain tissues or cell types (e.g. immune, tonsils, colon, kidney, cancerous and wounded tissues) or bodily fluids (e.g. lymph, serum, plasma, urine, synovial fluid and spinal fluid) or another tissue or cell sample taken from an individual having such a disorder, relative to the standard gene expression level, i.e., the expression level in healthy tissue or bodily fluid from an individual not having the disorder.

[0196] Predicted epitopes include those comprising a sequence shown in SEQ ID NO:274 as residues: Pro-22 to Glu-33.

[0197] The tissue distribution in tonsils, several cancers, and fetal tissues indicates that the protein product of this gene is useful for the diagnosis and treatment of diseases of the tonsil or colon, such as tonsilitis, inflammatory diseases involving nose and paranasal sinuses, especially during the infection of influenza, adenoviruses, parainfluenza, or rhinoviruses, for example. The gene may also be useful in the diagnosis and treatment of neoplasms of nasopharynx or colon origins. Protein, as well as, antibodies directed against the protein may show utility as a tumor marker and/or immunotherapy targets for the above listed tissues.

[0198] Many polynucleotide sequences, such as EST sequences, are publicly available and accessible through sequence databases. Some of these sequences are related to SEQ ID NO:36 and may have been publicly available prior to conception of the present invention. Preferably, such related polynucleotides are specifically excluded from the scope of the present invention. To list every related sequence is cumbersome. Accordingly, preferably excluded from the present invention are one or more polynucleotides comprising a nucleotide sequence described by the general formula of a-b, where a is any integer between 1 to 898 of SEQ ID NO:36, b is an integer of 15 to 912, where both a and b correspond to the positions of nucleotide residues shown in SEQ ID NO:36, and where b is greater than or equal to a+14.

[0199] Features of Protein Encoded by Gene No: 27

[0200] In specific embodiments, polypeptides of the invention comprise, or alternatively consists of, an amino acid sequence selected from the group: MKRSLNENSARSTAGCLPVPLFNQKKRNRQPLTSNPLKDDSGISTPSDNYDFP PLPTDWAWEAVNPEXAPVMKTVDTGQIPHSVSRPLRSQDSVFNSIQSNTGRS QGGWSYRDGNKNTSLKTWXKNDFKPQCKRTNLVANDGKNSCPMSSGAQQ QKQLRTPEPPNLSRNKETELLRQTHSSKISGCTMRGIDKNSALQTLKPNFQQN QYKXQMLDDIPEDNTLKETSLYQLQFKEKASSLRIISAVIESMKYWREHAQKT VLLFEVLAVLDSAVTPGPYYSKTFLMRDGKNTLPCVFYEIDRELPRLIRGRVH RCVGNYDQKKNIFQCVSVRPASVSEQKTFQAFVKIAVEMQYYINVMNET (SEQ ID NO:553), SQDSVFNSIQSNTGRSQGGWSYRDGNKNTSLKTWXKNDFKPQCKR (SEQ ID NO:554), NKETELLRQTHSSKISGCTMRGLDKNSALQTLKPNF (SEQ ID NO:555), SSLRIISAVIESMKYWREHAQKTVLLFEVLAVLDSAVTPGPYYSKTFLM (SEQ ID NO:556), and/or PRLIRGRVHRCVGNYDQKKNIFQCVSVRPASVSEQKTFQAFV (SEQ ID NO:557). Moreover, fragments and variants of these polypeptides (such as, for example, fragments as described herein, polypeptides at least 80%, 85%, 90%, 95%, 96%, 97%, 98%, or 99% identical to these polypeptides and polypeptides encoded by the polynucleotide which hybridizes, under stringent conditions, to the polynucleotide encoding these polypeptides) are encompassed by the invention. Antibodies that bind polypeptides of the invention are also encompassed by the invention. Polynucleotides encoding these polypeptides are also encompassed by the invention.

[0201] This gene is expressed primarily in human testes.

[0202] Polynucleotides and polypeptides of the invention are useful as reagents for differential identification of the tissue(s) or cell type(s) present in a biological sample and for diagnosis of diseases and conditions which include, but are not limited to, male reproductive disorders, including cancer. Similarly, polypeptides and antibodies directed to these polypeptides are useful in providing immunological probes for differential identification of the tissue(s) or cell type(s). For a number of disorders of the above tissues or cells, particularly of the male reproductive system, expression of this gene at significantly higher or lower levels may be routinely detected in certain tissues or cell types (e.g. testes, cancerous and wounded tissues) or bodily fluids (e.g. lymph, serum, seminal fluid, plasma, urine, synovial fluid and spinal fluid) or another tissue or cell sample taken from an individual having such a disorder, relative to the standard gene expression level, i.e., the expression level in healthy tissue or bodily fluid from an individual not having the disorder.

[0203] The tissue distribution in human testes indicates that the protein product of this gene is useful as a hormone with reproductive or other systemic functions; contraceptive development; male infertility of testicular causes, such as Kleinfelter's syndrome, varicocele, orchitis; male sexual dysfunctions; testicular neoplasms; and inflammatory disorders such as epididymitis. Furthermore, this gene product is useful in the treatment of male infertility and/or impotence. This gene product is also useful in assays designed to identify binding agents as such agents (antagonists) are useful as male contraceptive agents. Similarly, the protein is believed to by useful in the treatment and/or diagnosis of testicular cancer. The testes are also a site of active gene expression of transcripts that may be expressed, particularly at low levels, in other tissues of the body. Therefore, this gene product may be expressed in other specific tissues or organs where it may play related functional roles in other processes, such as hematopoiesis, inflammation, bone formation, and kidney function, to name a few possible target indications.

[0204] Many polynucleotide sequences, such as EST sequences, are publicly available and accessible through sequence databases. Some of these sequences are related to SEQ ID NO:37 and may have been publicly available prior to conception of the present invention. Preferably, such related polynucleotides are specifically excluded from the scope of the present invention. To list every related sequence is cumbersome. Accordingly, preferably excluded from the present invention are one or more polynucleotides comprising a nucleotide sequence described by the general formula of a-b, where a is any integer between 1 to 1368 of SEQ ID NO:37, b is an integer of 15 to 1382, where both a and b correspond to the positions of nucleotide residues shown in SEQ ID NO:37, and where b is greater than or equal to a+14.

[0205] Features of Protein Encoded by Gene No: 28

[0206] This gene is expressed primarily in apoptotic T-cell.

[0207] Polynucleotides and polypeptides of the invention are useful as reagents for differential identification of the tissue(s) or cell type(s) present in a biological sample and for diagnosis of diseases and conditions which include, but are not limited to, diseases relating to T cells, as well as cancer in general. Similarly, polypeptides and antibodies directed to these polypeptides are useful in providing immunological probes for differential identification of the tissue(s) or cell type(s). For a number of disorders of the above tissues or cells, particularly of the disorders of the immune system, expression of this gene at significantly higher or lower levels may be routinely detected in certain tissues or cell types (e.g. immune, cancerous and wounded tissues) or bodily fluids (e.g. lymph, serum, plasma, urine, synovial fluid and spinal fluid) or another tissue or cell sample taken from an individual having such a disorder, relative to the standard gene expression level, i.e., the expression level in healthy tissue or bodily fluid from an individual not having the disorder.

[0208] The tissue distribution in apoptotic T-cells indicates that the protein product of this gene is useful for the detection and/or treatment of disorders of the immune system. Moreover, since the gene was isolated from an apoptotic cell, and based on the understanding of the relationship of apoptosis and cancer, it is likely that this gene may play a role in the genesis of cancer. Furthermore, expression of this gene product in T cells also strongly indicates a role for this protein in immune function and immune surveillance.

[0209] Many polynucleotide sequences, such as EST sequences, are publicly available and accessible through sequence databases. Some of these sequences are related to SEQ ID NO:38 and may have been publicly available prior to conception of the present invention. Preferably, such related polynucleotides are specifically excluded from the scope of the present invention. To list every related sequence is cumbersome. Accordingly, preferably excluded from the present invention are one or more polynucleotides comprising a nucleotide sequence described by the general formula of a-b, where a is any integer between 1 to 858 of SEQ ID NO:38, b is an integer of 15 to 872, where both a and b correspond to the positions of nucleotide residues shown in SEQ ID NO:38, and where b is greater than or equal to a+14.

[0210] Features of Protein Encoded by Gene No: 29

[0211] This gene is expressed primarily in human tonsils.

[0212] Polynucleotides and polypeptides of the invention are useful as reagents for differential identification of the tissue(s) or cell type(s) present in a biological sample and for diagnosis of diseases and conditions which include, but are not limited to, gastrointestinal and immune disorders. Similarly, polypeptides and antibodies directed to these polypeptides are useful in providing immunological probes for differential identification of the tissue(s) or cell type(s). For a number of disorders of the above tissues or cells, particularly of the gastrointestinal and immune system, expression of this gene at significantly higher or lower levels may be routinely detected in certain tissues or cell types (e.g. immune, gastrointestinal, cancerous and wounded tissues) or bodily fluids (e.g. lymph, serum, plasma, urine, synovial fluid and spinal fluid) or another tissue or cell sample taken from an individual having such a disorder, relative to the standard gene expression level, i.e., the expression level in healthy tissue or bodily fluid from an individual not having the disorder.

[0213] The tissue distribution in human tonsils indicates that the protein product of this gene is useful for the diagnosis and treatment of gastrointestinal diseases. Alternatively, the tissue distribution indicates that the protein product of this gene is useful for the diagnosis and treatment of a variety of immune system disorders. Expression of this gene product in tonsils indicates a role in the regulation of the proliferation; survival; differentiation; and/or activation of potentially all hematopoietic cell lineages, including blood stem cells. This gene product may be involved in the regulation of cytokine production, antigen presentation, or other processes that may also suggest a usefulness in the treatment of cancer (e.g. by boosting immune responses). Since the gene is expressed in cells of lymphoid origin, the gene or protein, as well as, antibodies directed against the protein may show utility as a tumor marker and/or immunotherapy targets for the above listed tissues. Therefore it may be also used as an agent for immunological disorders including arthritis, asthma, immune deficiency diseases such as AIDS, leukemia, rheumatoid arthritis, inflammatory bowel disease, sepsis, acne, and psoriasis. In addition, this gene product may have commercial utility in the expansion of stem cells and committed progenitors of various blood lineages, and in the differentiation and/or proliferation of various cell types. Protein, as well as, antibodies directed against the protein may show utility as a tumor marker and/or immunotherapy targets for the above listed tissues.

[0214] Many polynucleotide sequences, such as EST sequences, are publicly available and accessible through sequence databases. Some of these sequences are related to SEQ ID NO:39 and may have been publicly available prior to conception of the present invention. Preferably, such related polynucleotides are specifically excluded from the scope of the present invention. To list every related sequence is cumbersome. Accordingly, preferably excluded from the present invention are one or more polynucleotides comprising a nucleotide sequence described by the general formula of a-b, where a is any integer between 1 to 798 of SEQ ID NO:39, b is an integer of 15 to 812, where both a and b correspond to the positions of nucleotide residues shown in SEQ ID NO:39, and where b is greater than or equal to a+14.

[0215] Features of Protein Encoded by Gene No: 30

[0216] This gene is expressed primarily in human T-cells, and to a lesser extent, in human colon carcinoma.

[0217] The translation product of this gene shares sequence homology with C44C1.2 gene product of Caenorhabditis elegans.

[0218] Preferred polypeptides of the present invention comprise, or alternatively consist of, one, two, three, four, five, six, seven or all seven of the immunogenic epitopes shown in SEQ ID NO:278 as residues: Leu-21 to Ala-30, Ser-38 to Asp-47, Pro-87 to Asp-94, Leu-197 to Thr-204, Pro-256 to Ser-262, Thr-277 to Arg-282, and/or Thr-293 to Trp-303. Polynucleotides encoding these polypeptides are also encompassed by the invention, as are antibodies that bind one or more of these peptides.

[0219] Additionally, preferred polypeptides of the present invention comprise, or alternatively consist of, one, two, or both of the immunogenic epitopes shown in SEQ ID NO:1232 as residues: Gly-204 to Gly-234 and Arg-202 to Asp-236. Polynucleotides encoding these polypeptides are also encompassed by the invention, as are antibodies that bind one or more of these polypeptides.

[0220] In additional nonexclusive embodiments, preferred polypeptides of the invention also comprise, or alternatively consist of, one or more of the following amino acid sequences: Gly-188 to Val-203, Gly-188 to Thr-204, Thr-204 to Lys-257, Asp-280 to Leu-362 of SEQ ID 278 and Gly-204 to Gly-234 of SEQ ID NO:1232. Polynucleotides encoding these polypeptides are also encompassed by the invention, as are antibodies that bind one or more of these peptides.

[0221] In specific embodiments, polypeptides of the invention comprise, or alternatively consists of, an amino acid sequence selected from the group:

(SEQ ID NO:558)

GVFRPCVCGRPASLTCSPLDPEVGPYCDTPTMRTLFNLLWLALACSPVHT
TLSKSDAKKAASKTLLEKSQFSDKPVQDRGLVVTDLKAESVVLEHRSYCS
AKARDRHFAGDVLGYVTPWNSHGYDVTKVFGSKFTQISPVWLQLKRRGRE
MFEVTGLHDVDQGWMRAVRKHAKGLHIVPRLLFEDWTYDDFRNVLDSEDE
IEELSKTVVQVAKNQHFDGFVVEVWNQLLSQKRVGLIHMLTHLAEALHQA
RLLALLVIPPAITPGTDQLGMFTHKEFEQLAPVLDGFSLMTYDYSTAHQP
GPNAPLSWVRACVQVLDPKXKWRTKSSWGSTSMXWTXRXPXDARXPVVGX
RXIQXLKDHXPRMVLDSKPQ,

(SEQ ID NO:559)

TCSPLDPEVGPYCDTPTMRTLFNLLWLALACSPVHTTLS,

(SEQ ID NO:560)

LVVTDLKAESVVLEHRSYCSAKARDRHFAGDVLGYVTPWNSHGYDVTKVF
GSKF,

(SEQ ID NO:561)

REMFEVTGLHDVDQGWMRAVRKHAKGLHIVPRLLFEDWTYDDFRNVLDSE
DE,

(SEQ ID NO:562)

HFDGFVVEVWNQLLSQKRVGLIHMLTHLAEALHQARLLALLVIPPAITPG
TDQLGM, and

(SEQ ID NO:563)

DGFSLMTYDYSTAHQPGPNAPLSWVRACVQVLDPKXKWRTKSSWGST.

[0222] ID NO:563). Moreover, fragments and variants of these polypeptides (such as, for example, fragments as described herein, polypeptides at least 80%, 85%, 90%, 95%, 96%, 97%, 98%, or 99% identical to these polypeptides and polypeptides encoded by the polynucleotide which hybridizes, under stringent conditions, to the polynucleotide encoding these polypeptides) are encompassed by the invention. Antibodies that bind polypeptides of the invention are also encompassed by the invention. Polynucleotides encoding these polypeptides are also encompassed by the invention.

[0223] In additional nonexclusive embodiments, polynucleotides of the invention comprise or alternatively consist of, one or more of the following sequences:

(SEQ ID NO:1228)

| | |
|---|---|
| GGCACGAGCGTTTTCCGGCCGTGCGTTTGTGGCCGTCCGGCCTCCCTGAC | t+L,32 |
| ATGCAGCCCTCTGGACCCCGAGGTTGGACCCTACTGTGACACACCTACCA | |
| TGCGGACACTCTTCAACCTCCTCTGGCTTGCCCTGGCCTGCAGCCCTGTT | |
| CACACTACCCTGTCAAAGTCAGATGCCAAAAAAGCCGCCTCAAAGACGCT | |
| GCTGGAGAAGAGTCAGTTTTCAGATAAGCCGGTGCAAGACCGGGGTTTGG | |
| TGGTGACGGACCTCAAAGCTGAGAGTGTGGTTCTTGAGCATCGCAGCTAC | |
| TGCTCGGCAAAGGCCCGGGACAGACACTTTGCTGGGGATGTACTGGGCTA | |
| TGTCACTCCATGGAACAGCCATGGCTACGATGTCACCAAGGTCTTTGGGA | |
| GCAAGTTCACACAGATCTCACCCGTCTGGCTGCAGCTGAAGAGACGTGGC | |
| CGTGAGATGTTTGAGGTCACGGGCCTCCACGACGTGGACCAAGGGTGGAT | |
| GCGAGCTGTCAGGAAGCATGCCAAGGGCCTGCACATAGTGCCTCGGCTCC | |
| TGTTTGAGGACTGGACTTACGATGATTTCCGGAACGTCTTAGACAGTGAG | |
| GATGAGATAGAGGAGCTGAGCAAGACCGTGGTCCAGGTGGCAAAGAACCA | |
| GCATTTCGATGGCTTCGTGGTGGAGGTCTGGAACCAGCTGCTAAGCCAGA | |
| AGCGCGTGGGCCTCATCCACATGCTCACCCACTTGGCCGAGGCTCTGCAC | |
| CAGGCCCGGCTGCTGGCCCTCCTGGTCATCCCGCCTGCCATCACCCCCGG | |
| GACCGACCAGCTGGGCATGTTCACGCACAAGGAGTTTGAGCAGCTGGCCC | |
| CCGTGCTGGATGGTTTCAGCCTCATGACCTACGACTACTCTACAGCGCAT | |
| CAGCCTGGCCCTAATGCACCCCTGTCCTGGGTTCGAGCCTGCGTCCAGGT | |
| CCTGGACCCGAAGTCCAAGTGGCGAAGCAAAATCCTCCTGGGGCTCAACT | |
| TCTATGGTACATCCAGACACTGAAGGACCACAGGCCCCGGATGGTGTGGG | |
| ACAGCCAGGTCTCAGAGCACTTCTTCGAGTACAAGAAGAGCCGCAGTGGG | |
| AGGCACGTCGTCTTCTACCCAACCCTGAAGTCCCTGCAGGTGCGGCTGGA | |
| GCTGGCCCGGGAGCTGGGCGTTGGGGTCTCTATCTGGGAGCTGGGCCAGG | |
| GCCTGGACTACTTCTACGACCTGCTCTAGGTGGGCATTGCGGCCTCCGCG | |
| GTGGACGTGTTCTTTTCTAAGCCATGGAGTGAGTGAGCAGGTGTGAAATA | |
| CAGGCCTCCACTCCGAAAAAAAAAAAAAAAAAAAAAAAAAAAAAAAAAAA | |
| AAAAAAAAAAAAAAAAAAAAAAAAAAAAAAAAAA, | |

(SEQ ID NO:1229)

GCGCTGGAGCGTTTTCCGGCCGTGCGTTTGTGGCCGTCCGGCCTCCCTGA
CATGCAGCCCTCTGGACCCCGAGGTTGGACCCTACTGTGACACACCTACC
ATGCGGACACTCTTCAACCTCCTCTGGCTTGCCCTGGCCTGCAGCCCTGT
TCACACTACCCTGTCAAAGTCAGATGCCAAAAAAGCCGCCTCAAAGACGC
TGCTGGAGAAGAGTCAGTTTTCAGATAAGCCGGTGCAAGACCGGGGTTTG
GTGGTGACGGACCTCAAAGCTGAGAGTGTGGTTCTTGAGCATCGCAGCTA
CTGCTCGGCAAAGGCCCGGGACAGACACTTTGCTGGGGATGTACTGGGCT
ATGTCACTCCATGGAACAGCCATGGCTACGATGTCACCAAGGTCTTTGGG
AGCAAGTTCACACAGATCTCACCCGTCTGGCTGCAGCTGAAGAGACGTGG
CCGTGAGATGTTTGAGGTCACGGGCCTCCACGACGTGGACCAAGGGTGGA
TGCGAGCTGTCAGGAAGCATGCCAAGGGCCTGCACATAGTGCCTCGGCTC
CTGTTTGAGGACTGGACTTACGATGATTTCCGGAACGTCTTAGACAGTGA
GGATGAGATAGAGGAGCTGAGCAAGACCGTGGTCCAGGTGGCAAAGAACC
AGCATTTCGATGGCTTCGTGGTGGAGGTCTGGAACCAGCTGCTAAGCCAG
AAGCGCGTGACCGACCAGCTGGGCATGTTCACGCACAAGGAGTTTGAGCA
GCTGGCCCCCGTGCTGGATGGTTTCAGCCTCATGACCTACGACTACTCTA
CAGCGCATCAGCCTGGCCCTAATGCACCCCTGTCCTGGGTTCGAGCCTGC
GTCCAGGTCCTGGACCCGAAGTCCAAGTGGCGAAGCAAAATCCTCCTGGG
GCTCAACTTCTATGGTATGGACTACGCGACCTCCAAGGATGCCCGTGAGC
CTGTTGTCGGGGCCAGGTACATCCAGACACTGAAGGACCACAGGCCCCGG
ATGGTGTGGGACAGCCAGGYCTCAGAGCACTTCTTCGAGTACAAGAAGAG
CCGCAGTGGGAGGCACGTCGTCTTCTACCCAACCCTGAAGTCCCTGCAGG
TGCGGCTGGAGCTGGCCCGGGAGCTGGGCGTTGGGGTCTCTATCTGGGAG
CTGGGCCAGGGCCTGGACTACTTCTACGACCTGCTCTAGGTGGGCATTGC
GGCCTCCGCGGTGGACGTGTTCTTTTCTAAGCCATGGAGTGAGTGAGCAG
GTGTGAAATACAGGCCTNCACTCCGTTCAAAAAAAAAAAAAAAAAAAAAA
AAAAAAAAAAAAAAAAAAAAAAAAAAAACTCGAG,

(SEQ ID NO:1230)

GGCGTTTTCCGGCCGTGCGTTTGTGGCCGTCCGGCCTCCCTGACATGCAG
CCCTCTGGACCCCGAGGTTGGACCCTACTGTGACACACCTACCATGCGGA
CACTCTTCAACCTCCTCTGGCTTGCCCTGGCCTGCAGCCCTGTTCACACT
ACCCTGTCAAAGTCAGATGCCAAAAAAGCCGCCTCAAAGACGCTGCTGGA
GAAGAGTCAGTTTTCAGATAAGCCGGTGCAAGACCGGGGTTTGGTGGTGA
CGGACCTCAAAGCTGAGAGTGTGGTTCTTGAGCATCGCAGCTaCTGCTcG
GCAAAGGCCCGGGACAGACACTTTGCTGGGGATGTACTGGGCTATGTCAC
TCCATGGAACAGCCATGGCTACGATGTCACCAAGGTCTTTGGGAGCAAGT
TCACACAGATCTCACCCGTCTGGCTGCAGCTGAAGAGACGTGGCCGTGAG
ATGTTTGAGGTCACGGGCCTCCACGACGTGGACCAAGGGTGGATGCGAGC
TGTCAGGAAGCATGCCAAGGGCCTGCACATAGTGCCTCGGCTCCTGTTTG
AGGACTGGACTTACGATGATTTCCGGAACGTCTTAGACAGTGAGGATGAG
ATAGAGGAGCTGAGCAAGACCGTGGTCCAGGTGGCAAAGAACCAGCATTT
CGATGGCTTCGTGGTGGAGGTCTGGAACCAGCTGCTAAGCCAGAAGCGCG
TGGGCCTCATCCACATGCTCACCCACTTGGCCGAGGCTCTGCACCAGGCC
CGGCTGCTGGCCCTCCTGGTCATCCCGCCTGCCATCACCCCCGGGACCGA
CCAGCTGGGCATGTTCACGCACAAGGAGTTTGAGCAGCTGGCCCCCGTGC
TGGATGGTTTCAGCCTCATGACCTACGACTACTCTACAGCGCATCAGCCT
GGcCCTAATGCACCCcTGTCCTGGGTTCGAGCCTGCGTCCAGGTCCTGGA
CCCGAARTYCAAGTGGCGAACAAAATCCTCCTGGGGSTCAACTTCTATGG
WATGGACTAMGCGACYTCCAANGGATGCCCGTKARCCTGTTGTCGGGGSC
AGGTAMATYCAGAMACTGAARGACCACANGCCCCGGATGGTGTTGGACAG
CAAGCCTCAAAG, and

(SEQ ID NO:1231)

ATAAGAGACAGCGTCAGGGGGGCGGAGCCTATGGAAAAACGCCAGCAACG
CGGNCTTTTTACGGTTCCTGGCCTTTTGCTGGCCTTTTGCTCACATGTTC
TTTCCTGCGTTATCCCCTGATTCTGTGGATAACCGTATTACCGCCTTTGA
GTGAGCTGATACCGCTCGCCGCAGCCGAACGACCGAGCGCAGCGAGTCAG
TGAGCGAGGAAGCGGAAGAGCGCCCAATACGCAAACCGCCTCTCCCCGCG
CGTTGGCCGATTCATTAATGCAGCTGGCACGACAGGTTTCCCGACTGGAA
AGCGGGCAGTGAGCGCAACGCAATTAATGTGAGTTAGCTCACTCATTAGG
CACCCCAGGCTTTACACTTTATGCTTCCGGCTCGTATGTTGTGTGGAATT
GTGAGCGGATAACAATTTCACACAGGAAACAGCTATGACCATGATTACGC
CAAGCTCGAAATTAACCCTCACTAAAGGGAACAAAAGCTGGAGCTCCACC
GCGGTGGCGGCCGCTCTAGAACTAGTGGATCCCCCGGGCTGCAGGAATTC
GGCACGAGGTCCGGCCTCCCTGACATGCAGATTTCCACCCAGAAGACAGA
GAAGGAGCCAGTGGTCATGGAATGGGCTGGGGTCAAAGACTGGGTGCCTG
GGAGCTGAGGCAGCCACCGTTTCAGCCTGGCCAGCCCTCTGGACCCCGAG
GTTGGACCCTACTGTGACACACCTACCATGCGGACACTCTTCAACCTCCT
CTGGCTTGCCCTGGCCTGCAGCCCTGTTCACACTACCCTGTCAAAGTCAG
ATGCCAAAAAAGCCGCCTCAAAGACGCTGCTGGAGAAGAGTCAGTTTTCA
GATAAGCCGGTGCAAGACCGGGGTTTGGTGGTGACGGACCTCAAAGCTGA
GAGTGTGGTTCTTGAGCATCGCAGCTACTGCTCGGCAAAGGCCCGGGACA
GACACTTTGCTGGGGATGTACTGGGCTATGTCACTCCATGGAACAGCCAT
GGCTACGATGTCACCAAGGTCTTTGGGAGCAAGTTCACACAGATCTCACC
CGTCTGGCTGCAGCTGAAGAGACGTGGCCGTGAGATGTTTGAGGTCACGG
GCCTCCACGACGTGGACCAAGGGTGGATGCGAGCTGTCAGGAAGCATGCC
AAGGGCCTGCACATAGTGCCTCGGCTCCTGTTTGAGGACTGGACTTACGA
TGATTTCCGGAACGTCTTAGACAGTGAGGATGAGATAGAGGAGCTGAGCA
AGACCGTGGTCCAGGTGGCAAAGAACCAGCATTTCGATGGCTTCGTGGTG
GAGGTCTGGAACCAGCTGCTAAGCCAGAAGCGCGTGGGCCTCATCCACAT
GCTCACCCACTTGGCCGAGGCTCTGCACCAGGCCCGGCTGCTGGCCCTCC
TGGTCATCCCGCCTGCCATCACCCCCGGGACCGACCAGCTGGGCATGTTC
ACGCACAAGGAGTTTGAGCAGCTGGCCCCCGTGCTGGATGGTTTCAGCCT
CATGACCTACGACTACTCTACAGCGCATCAGCCTGGCCCTAATGCACCCC
TGTCCTGGGTTCGAGCCTGCGTCCAGGTCCTGGACCCGAAGTCCAAGTGG
CGAAGCAAAATCCTCCTGGGGCTCAACTTCTATGGTACATCCAGACACTG
AAGGACCACAGGCCCCGGATGGTGTGGGACAGCCAGGCCTCAGAGCACTT
CTTCGAGTACAAGAAGAGCCGCAGTGGGAGGCACGTCGTCTTCTACCCAA
CCCTGAAGTCCCTGCAGGTGCGGCTGGAGCTGGCCCGGGAGCTGGGCGTT
GGGGTCTCTATCTGGGAGCTGGGCCAGGGCCTGGACTACTTCTACGACCT
GCTCTAGGTGGGCATTGCGGCCTCCGCGGTGGACGTGTTCTTTTCTAAGC
CATGGAGTGAGTGAGCAGGTGTGAAATACAGGCCTCCACTCCGTTAAAAA
AAAAAAAAAAAAAAAAAACTCGAGGGGGGGCCCGGTACCCAATTCGCCCT
ATAGTGAGTCGTATTACAATTCACTGGCCGTCGTTTTACAACGTCGTGAC
TGGGAAAACCCTGGCGTTACCCAACTTAATCGCCTTGCAGCACATCCCCC
TTTCGCCAGCTGGCGTAATAGCGAAGAGGCCCGCACCGATCGCCCTTCCC
AACAGTTGCGCAGCCTGAATGGCGAATGGCAAATTGTAAGCGTTAATATT
TTGTTAAAATTCGCGTTAAATTTTTGTTAAATCAGCTCATTTTTTAACCA
ATAGGCCGAAATCGGCAAAATCCCTTATAAATCAAAAGAATAGACCGAGA
TAGGGTTGAGTGTTGNTCCAGTTTGGAACAAGAGTCCACTATTAAAGAAC
GTGGACTCCAACGTCAAAGGGCGAAAAACCGNCTATCAGGGCGATGGCCC
ACTACGTGAACCATCACCCTTAATCAAAGTTTTTTGGGGTCGAGGTNCCC
CTAAAAGCACTTAATCGGGAACCC.

[0224] by these polynucleotides are also encompassed by the invention, as are antibodies that bind to these polypeptides.

[0225] In other specific embodiments, polypeptides of the invention comprise, or alternatively consists of, an amino acid sequence selected from the group: MRTLFNLLWLALACSPVHTTLSKSDAKKAASKTLLEKSQFSDKPVQDRGLVV TDLKAESVVLEHRSYCSAKARDRHFAGDVLGYVTPWNSHGYDVTKVFGSKF TQISPVWLQLKRRGREMFEVTGLHDVDQGWMRAVRKHAKGLHIVPRLLFED WTYDDFRNVLDSEDEIEELSKTVVQVAKNQHFDGFVVEVWNQLLSQKRVGL IHMLTHLAEALHQARLLALLVIPPAITPGTDQLGMFTHKEFEQLAPVLDGFSL MTYDYSTAHQPGPNAPLSWVRACVQVLDPKSKWRSKILLGLNFYGTSRH (SEQ ID NO:1232), MRTLFNLLWLALACSPVHTTLSKSDAKKAASKTLLEKSQFSDKPVQDRGLVV TDLKAESVVLEHRSYCSAKARDRHFAGDVLGYVTPWNSHGYDVTKVFGSKF TQISPVWLQLKRRGREMFEVTGLHDVDQGWMRAVRKHAKGLHIVPRLLFED WTYDDFRNVLDSEDEIEELSKTVVQVAKNQHFDGFVVEVWNQLLSQKRVTD QLGMFTHKEFEQLAPVLDGFSLMTYDYSTAHQPGPNAPLSWVRACVQVLDP KSKWRSKILLGLNFYGMDYATSKDAREPVVGARYIQTLKDHRPRMVWDSQ XSEHFFEYKKSRSGRHVVFYPTLKSLQVRLELARELGVGVSIWELGQGLDYF YDLL (SEQ ID NO:1233), MRTLFNLLWLALACSPVHTTLSKSDAKKAASKTLLEKSQFSDKPVQDRGLVV TDLKAESVVLEHRSYCSAKARDRHFAGDVLGYVTPWNSHGYDVTKVFGSKF TQISPVWLQLKRRGREMFEVTGLHDVDQGWMRAVRKAKGLHIVPRLLFED WTYDDFRNVLDSEDEIEELSKTVVQVAKNQHFDGFVVEVWNQLLSQKRVGL IHMLTHLAEALHQARLLALLVIPPAITPGTDQLGMFTHKEFEQLAPVLDGFSL MTYDYSTAHQPGPNAPLSWVRACVQVLDPKXKWRTKSSWGSTSMXWTXR XPXDARXPVVGXRX (SEQ ID NO:1234), and MRTLFNLLWLALACSPVHTTLSKSDAKKAASKTLLEKSQFSDKPVQDRGLVV TDLKAESVVLEHRSYCSAKARDRHFAGDVLGYVTPWNSHGYDVTKVFGSKF TQISPVWLQLKRRGREMFEVTGLHDVDQGWMRAVRKHAKGLHIVPRLLFED WTYDDFRNVLDSEDEIEELSKTVVQVAKNQHFDGFVVEVWNQLLSQKRVGL IHMLTHLAEALHQARLLALLVIPPAITPGTDQLGMFTHKEFEQLAPVLDGFSL MTYDYSTAHQPGPNAPLSWVRACVQVLDPKSKWRSKILLGLNFYGTSRH (SEQ ID NO:1235). Moreover, fragments and variants of these polypeptides (such as, for example, fragments as described herein, polypeptides at least 80%, 85%, 90%, 95%, 96%, 97%, 98%, or 99% identical to these polypeptides and polypeptides encoded by the polynucleotide which hybridizes, under stringent conditions, to the polynucleotide encoding these polypeptides) are encompassed by the invention. Antibodies that bind polypeptides of the invention are also encompassed by the invention. Polynucleotides encoding these polypeptides are also encompassed by the invention.

[0226] Also preferred are polypeptides, comprising or alternatively consisting of, the mature polypeptide which is predicted to consist of residues 23-362 of the foregoing sequence (SEQ ID NO:278), and biologically active fragments of the mature polypeptide (e.g., fragments that inhibit the Mixed Lymphocyte Reaction).

[0227] Polynucleotides Encoding These Polypeptides are also Encompassed by the Invention

[0228] FIGS. 1A-B show the nucleotide (SEQ ID NO:40) and deduced amino acid sequence (SEQ ID NO:278) corresponding to this gene.

[0229] FIG. 2 shows an analysis of the amino acid sequence (SEQ ID NO:278). Alpha, beta, turn and coil regions; hydrophilicity and hydrophobicity; amphipathic regions; flexible regions; antigenic index and surface probability are shown, and all were generated using the default settings of the recited computer algorithms. In the “Antigenic Index or Jameson-Wolf” graph, the positive peaks indicate locations of the highly antigenic regions of the protein, i.e., regions from which epitope-bearing peptides of the invention can be obtained. Polypeptides comprising, or alternatively consisting of, domains defined by these graphs are contemplated by the present invention, as are polynucleotides encoding these polypeptides.

[0230] The data presented in FIG. 2 are also represented in tabular form in Table 3. The columns are labeled with the headings “Res”, “PositiLon”, and Roman Numerals I-XIV. The column headings refer to the following features of the amino acid sequence presented in FIG. 2, and Table 3: “Res”: amino acid residue of SEQ ID NO:278 and FIGS. 1A and 1B; “Position”: position of the corresponding residue within SEQ ID NO:278 and FIGS. 1A and 1B; I: Alpha, Regions—Garnier-Robson; II: Alpha, Regions—Chou-Fasman; III: Beta, Regions—Garnier-Robson; IV: Beta, Regions—Chou-Fasman; V: Turn, Regions—Garnier-Robson; VI: Turn, Regions—Chou-Fasman; VII: Coil, Regions—Garnier-Robson; VIII: Hydrophilicity Plot—Kyte-Doolittle; IX: Hydrophobicity Plot—Hopp-Woods; X: Alpha, Amphipathic Regions—Eisenberg; XI: Beta, Amphipathic Regions—Eisenberg; XII: Flexible Regions—Karplus-Schulz; XIII: Antigenic Index—Jameson-Wolf; and XIV: Surface Probability Plot—Emini.

[0231] Preferred embodiments of the invention in this regard include fragments that comprise, or alternatively consisting of, one or more of the following regions: alpha-helix and alpha-helix forming regions (“alpha-regions”), beta-sheet and beta-sheet forming regions (“beta-regions”), turn and turn-forming regions (“turn-regions”), coil and coil-forming regions (“coil-regions”), hydrophilic regions, hydrophobic regions, alpha amphipathic regions, beta amphipathic regions, flexible regions, surface-forming regions and high antigenic index regions. The data representing the structural or functional attributes of the protein set forth in FIG. 2 and/or Table 3, as described above, was generated using the various modules and algorithms of the DNA*STAR set on default parameters. In a preferred embodiment, the data presented in columns VIII, IX, XIII, and XIV of Table 3 can be used to determine regions of the protein which exhibit a high degree of potential for antigenicity. Regions of high antigenicity are determined from the data presented in columns VIII, IX, XIII, and/or XIV by choosing values which represent regions of the polypeptide which are likely to be exposed on the surface of the polypeptide in an environment in which antigen recognition may occur in the process of initiation of an immune response.

[0232] Certain preferred regions in these regards are set out in FIG. 2, but may, as shown in Table 3, be represented or identified by using tabular representations of the data presented in FIG. 2. The DNA*STAR computer algorithm used to generate FIG. 2 (set on the original default parameters) was used to present the data in FIG. 2 in a tabular format (See Table 3). The tabular format of the data in FIG. 2 is used to easily determine specific boundaries of a preferred region.

[0233] The present invention is further directed to fragments of the polynucleotide sequences described herein. By a fragment of, for example, the polynucleotide sequence of a deposited cDNA or the nucleotide sequence shown in SEQ ID NO:40, is intended polynucleotide fragments at least about 15 nt, and more preferably at least about 20 nt, at least about 25 nt, still more preferably at least about 30 nt, at least about 35 nt, and even more preferably, at least about 40 nt in length, at least about 45 nt in length, at least about 50 nt in length, at least about 60 nt in length, at least about 70 nt in length, at least about 80 nt in length, at least about 90 nt in length, at least about 100 nt in length, at least about 125 nt in length, at least about 150 nt in length, at least about 175 nt in length, which are useful as diagnostic probes and primers as discussed herein. Of course, larger fragments 200-1500 nt in length are also useful according to the present invention, as are fragments corresponding to most, if not all, of the nucleotide sequence of a deposited cDNA or as shown in SEQ ID NO:40. By a fragment at least 20 nt in length, for example, is intended fragments which include 20 or more contiguous bases from the nucleotide sequence of a deposited cDNA or the nucleotide sequence as shown in SEQ ID NO:40. In this context “about” includes the particularly recited size, an sizes larger or smaller by several (5, 4, 3, 2, or 1) nucleotides, at either terminus or at both termini. Representative examples of polynucleotide fragments of the invention include, for example, fragments that comprise, or alternatively, consist of, a sequence from about nucleotide 1 to about 50, from about 51 to about 100, from about 101 to about 150, from about 151 to about 200, from about 201 to about 250, from about 251 to about 300, from about 301 to about 350, from about 351 to about 400, from about 401 to about 450, from about 451 to about 500, and from about 501 to about 550, and from about 551 to about 600, from about 601 to about 650, from about 651 to about 700, from about 701 to about 750, from about 751 to about 800, from about 801 to about 850, from about 851 to about 900, from about 901 to about 950, from about 951 to about 1000, from about 1001 to about 1050, from about 1051 to about 1100, from about 1101 to about 1150 from about 1151 to about 1200, from about 1201 to about 1250, from about 1251 to about 1300, from about 1301 to about 1350, from about 1351 to about 1400, from about 1401 to about 1450, and from about 1451 to about 1515, of SEQ ID NO:40, or the complementary strand thereto, or the cDNA contained in a deposited clone. In this context “about” includes the particularly recited ranges, and ranges larger or smaller by several (5, 4, 3, 2, or 1) nucleotides, at either terminus or at both termini. In additional embodiments, the polynucleotides of the invention encode functional attributes of the corresponding protein.

[0234] Preferred polypeptide fragments of the invention comprise, or alternatively consist of, the secreted protein having a continuous series of deleted residues from the amino or the carboxyl terminus, or both. Particularly, N-terminal deletions of the polypeptide can be described by the general formula m-362 where m is an integer from 2 to 356, where m corresponds to the position of the amino acid residue identified in SEQ ID NO:278. More in particular, the invention provides polynucleotides encoding polypeptides comprising, or alternatively consisting of, an amino acid sequence selected from the group: K-23 to L-362; S-24 to L-362; D-25 to L-362; A-26 to L-362; K-27 to L-362; K-28 to L-362; A-29 to L-362; A-30 to L-362; S-31 to L-362; K-32 to L-362; T-33 to L-362; L-34 to L-362; L-35 to L-362; E-36 to L-362; K-37 to L-362; S-38 to L-362; Q-39 to L-362; F-40 to L-362; S-41 to L-362; D-42 to L-362; K-43 to L-362; P-44 to L-362; V-45 to L-362; Q-46 to L-362; D-47 to L-362; R-48 to L-362; G-49 to L-362; L-50 to L-362; V-51 to L-362; V-52 to L-362; T-53 to L-362; D-54 to L-362; L-55 to L-362; K-56 to L-362; A-57 to L-362; E-58 to L-362; S-59 to L-362; V-60 to L-362; V-61 to L-362; L-62 to L-362; E-63 to L-362; H-64 to L-362; R-65 to L-362; S-66 to L-362; Y-67 to L—362; C-68 to L-362; S-69 to L-362; A-70 to L-362; K-71 to L-362; A-72 to L-362; R-0.73 to L-362; D-74 to L-362; R-75 to L-362; H-76 to L-362; F-77 to L-362; A-78 to L-362; G-79 to L-362; D-80 to L-362; V-81 to L-362; L-82 to L-362; G-83 to L-362; Y-84 to L-362; V-85 to L-362; T-86 to L-362; P-87 to L-362; W-88 to L-362; N-89 to L-362; S-90 to L-362; H-91 to L-362; G-92 to L-362; Y-93 to L-362; D-94 to L-362; V-95 to L-362; T-96 to L-362; K-97 to L-362; V-98 to L-362; F-99 to L-362; G-100 to L-362; S-101 to L-362; K-102 to L-362; F-103 to L-362; T-104 to L-362; Q-105 to L-362; I-106 to L-362; S-107 to L-362; P-108 to L-362; V-109 to L-362; W-110 to L-362; L-111 to L-362; Q-112 to L-362; L-113 to L-362; K-114 to L-362; R-115 to L-362; R-116 to L-362; G-117 to L-362; R-118 to L-362; E-119 to L-362; M-120 to L-362; F-121 to L-362; E-122 to L-362; V-123 to L-362; T-124 to L-362; G-125 to L-362; L-126 to L-362; H-127 to L-362; D-128 to L-362; V-129 to L-362; D-130 to L-362; Q-131 to L-362; G-132 to L-362; W-133 to L-362; M-134 to L-362; R-135 to L-362; A-136 to L-362; V-137 to L-362; R-138 to L-362; K-139 to L-362; H-140 to L-362; A-141 to L-362; K-142 to L-362; G-143 to L-362; L-144 to L-362; H-145 to L-362; I-146 to L-362; V-147 to L-362; P-148 to L-362; R-149 to L-362; L-150 to L-362; L-151 to L-362; F-152 to L-362; E-153 to L-362; D-154 to L-362; W-155 to L-362; T-156 to L-362; Y-157 to L-362; D-158 to L-362; D-159 to L-362; F-160 to L-362; R-161 to L-362; N-162 to L-362; V-163 to L-362; L-164 to L-362; D-165 to L-362; S-166 to L-362; E-167 to L-362; D-168 to L-362; E-169 to L-362; I-170 to L-362; E-171 to L-362; E-172 to L-362; L-173 to L-362; S-174 to L-362; K-175 to L-362; T-176 to L-362; V-177 to L-362; V-178 to L-362; Q-179 to L-362; V-180 to L-362; A-181 to L-362; K-182 to L-362; N-183 to L-362; Q-184 to L-362; H-185 to L-362; F-186 to L-362; D-187 to L-362; G-188 to L-362; F-189 to L-362; V-190 to L-362; V-191 to L-362; E-192 to L-362; V-193 to L-362; W-194 to L-362; N-195 to L-362; Q-196 to L-362; L-197 to L-362; L-198 to L-362; S-199 to L-362; Q-200 to L-362; K-201 to L-362; R-202 to L-362; V-203 to L-362; T-204 to L-362; D-205 to L-362; Q-206 to L-362; L-207 to L-362; G-208 to L-362; M-209 to L-362; F-210 to L-362; T-211 to L-362; H-212 to L-362; K-213 to L-362; E-214 to L-362; F-215 to L-362; E-216 to L-362; Q-217 to L-362; L-218 to L-362; A-219 to L-362; P-220 to L-362; V-221 to L-362; L-222 to L-362; D-223 to L-362; G-224 to L-362; F-225 to L-362; S-226 to L-362; L-227 to L-362; M-228 to L-362; T-229 to L-362; Y-230 to L-362; D-231 to L-362; Y-232 to L-362; S-233 to L-362; T-234 to L-362; A-235 to L-362; H-236 to L-362; Q-237 to L-362; P-238 to L-362; G-239 to L-362; P-240 to L-362; N-241 to L-362; A-242 to L-362; P-243 to L-362; L-244 to L-362; S-245 to L-362; W-246 to L-362; V-247 to L-362; R-248 to L-362; A-249 to L-362; C-250 to L-362; V-251 to L-362; Q-252 to L-362; V-253 to L-362; L-254 to L-362; D-255 to L-362; P-256 to L-362; K-257 to L-362; S-258 to L-362; K-259 to L-362; W-260 to L-362; R-261 to L-362; S-262 to L-362; K-263 to L-362; I-264 to L-362; L-265 to L-362; L-266 to L-362; G-267 to L-362; L-268 to L-362; N-269 to L-362; F-270 to L-362; Y-271 to L-362; G-272 to L-362; M-273 to L-362; D-274 to L-362; Y-275 to L-362; A-276 to L-362; T-277 to L-362; S-278 to L-362; K-279 to L-362; D-280 to L-362; A-281 to L-362; R-282 to L-362; E-283 to L-362; P-284 to L-362; V-285 to L-362; V-286 to L-362; G-287 to L-362; A-288 to L-362; R-289 to L-362; Y-290 to L-362; I-291 to L-362; Q-292 to L-362; T-293 to L-362; L-294 to L-362; K-295 to L-362; D-296 to L-362; H-297 to L-362; R-298 to L-362; P-299 to L-362; R-300 to L-362; M-301 to L-362; V-302 to L-362; W-303 to L-362; D-304 to L-362; S-305 to L-362; Q-306 to L-362; X-307 to L-362; S-308 to L-362; E-309 to L-362; H-310 to L-362; F-311 to L-362; F-312 to L-362; E-313 to L-362; Y-314 to L-362; K-315 to L-362; K-316 to L-362; S-317 to L-362; R-318 to L-362; S-319 to L-362; G-320 to L-362; R-321 to L-362; H-322 to L-362; V-323 to L-362; V-324 to L-362; F-325 to L-362; Y-326 to L-362; P-327 to L-362; T-328 to L-362; L-329 to L-362; K-330 to L-362; S-331 to L-362; L-332 to L-362; Q-333 to L-362; V-334 to L-362; R-335 to L-362; L-336 to L-362; E-337 to L-362; L-338 to L-362; A-339 to L-362; R-340 to L-362; E-341 to L-362; L-342 to L-362; G-343 to L-362; V-344 to L-362; G-345 to L-362; V-346 to L-362; S-347 to L-362; I-348 to L-362; W-349 to L-362; E-350 to L-362; L-351 to L-362; G-352 to L-362; Q-353 to L-362; G-354 to L-362; L-355 to L-362; D-356 to L-362; and Y-357 to L-362 of SEQ ID NO:278. Polypeptides encoded by these polynucleotides are also encompassed by the invention.

[0235] Additionally, the invention provides polynucleotides encoding polypeptides comprising, or alternatively consisting of, an amino acid sequence selected from the group: R-2 to H-307; T-3 to H-307; L-4 to H-307; F-5 to H-307; N-6 to H-307; L-7 to H-307; L-8 to H-307; W-9 to H-307; L-10 to H-307; A-11 to H-307; L-12 to H-307; A-13 to H-307; C-14 to H-307; S-15 to H-307; P-16 to H-307; V-17 to H-307; H-18 to H-307; T-19 to H-307; T-20 to H-307; L-21 to H-307; S-22 to H-307; K-23 to H-307; S-24 to H-307; D-25 to H-307; A-26 to H-307; K-27 to H-307; K-28 to H-307; A-29 to H-307; A-30 to H-307; S-31 to H-307; K-32 to H-307; T-33 to H-307; L-34 to H-307; L-35 to H-307; E-36 to H-307; K-37 to H-307; S-38 to H-307; Q-39 to H-307; F-40 to H-307; S-41 to H-307; D-42 to H-307; K-43 to H-307; P-44 to H-307; V-45 to H-307; Q-46 to H-307; D-47 to H-307; R-48 to H-307; G-49 to H-307; L-50 to H-307; V-51 to H-307; V-52 to H-307; T-53 to H-307; D-54 to H-307; L-55 to H-307; K-56 to H-307; A-57 to H-307; E-58 to H-307; S-59 to H-307; V-60 to H-307; V-61 to H-307; L-62 to H-307; E-63 to H-307; H-64 to H-307; R-65 to H-307; S-66 to H-307; Y-67 to H-307; C-68 to H-307; S-69 to H-307; A-70 to H-307; K-71 to H-307; A-72 to H-307; R-73 to H-307; D-74 to H-307; R-75 to H-307; H-76 to H-307; F-77 to H-307; A-78 to H-307; G-79 to H-307; D-80 to H-307; V-81 to H-307; L-82 to H-307; G-83 to H-307; Y-84 to H-307; V-85 to H-307; T-86 to H-307; P-87 to H-307; W-88 to H-307; N-89 to H-307; S-90 to H-307; H-91 to H-307; G-92 to H-307; Y-93 to H-307; D-94 to H-307; V-95 to H-307; T-96 to H-307; K-97 to H-307; V-98 to H-307; F-99 to H-307; G-100 to H-307; S-101 to H-307; K-102 to H-307; F-103 to H-307; T-104 to H-307; Q-105 to H-307; I-106 to H-307; S-107 to H-307; P-108 to H-307; V-109 to H-307; W-10 to H-307; L-111 to H-307; Q-112 to H-307; L-113 to H-307; K-114 to H-307; R-115 to H-307; R-116 to H-307; G-117 to H-307; R-118 to H-307; E-119 to H-307; M-120 to H-307; F-121 to H-307; E-122 to H-307; V-123 to H-307; T-124 to H-307; G-125 to H-307; L-126 to H-307; H-127 to H-307; D-128 to H-307; V-129 to H-307; D-130 to H-307; Q-131 to H-307; G-132 to H-307; W-133 to H-307; M-134 to H-307; R-135 to H-307; A-136 to H-307; V-137 to H-307; R-138 to H-307; K-139 to H-307; H-140 to H-307; A-141 to H-307; K-142 to H-307; G-143 to H-307; L-144 to H-307; H-145 to H-307; I-146 to H-307; V-147 to H-307; P-148 to H-307; R-149 to H-307; L-150 to H-307; I-151 to H-307; F-152 to H-307; E-153 to H-307; D-154 to H-307; W-155 to H-307; T-156 to H-307; Y-157 to H-307; D-158 to H-307; D-159 to H-307; F-160 to H-30,7; R-161 to H-307; N-162 to H-307; V-163 to H-307; L-164 to H-307; D-165 to H-307; S-166 to H-307; E-167 to H-307; D-168 to H-307; E-169 to H-307; I-170 to H-307; E-171 to H-307; E-172 to H-307; L-173 to H-307; S-174 to H-307; K-175 to H-307; T-176 to H-307; V-177 to H-307; V-178 to H-307; Q-179 to H-307; V-180 to H-307; A-181 to H-307; K-182 to H-307; N-183 to H-307; Q-184 to H-307; H-185 to H-307; F-186 to H-307; D-187 to H-307; G-188 to H-307; F-189 to H-307; V-190 to H-307; V-191 to H-307; E-192 to H-307; V-193 to H-307; W-194 to H-307; N-195 to H-307; Q-196 to H-307; L-197 to H-307; L-198 to H-307; S-199 to H-307; Q-200 to H-307; K-201 to H-307; R-202 to H-307; V-203 to H-307; G-204 to H-307; L-205 to H-307; I-206 to H-307; H-207 to H-307; M-208 to H-307; L-209 to H-307; T-210 to H-307; H-211 to H-307; L-212 to H-307; A-213 to H-307; E-214 to H-307; A-215 to H-307; L-216 to H-307; H-217 to H-307; Q-218 to H-307; A-219 to H-307; R-220 to H-307; L-221 to H-307; L-222 to H-307; A-223 to H-307; L-224 to H-307; L-225 to H-307; V-226 to H-307; I-227 to H-307; P-228 to H-307; P-229 to H-307; A-230 to H-307; I-231 to H-307; T-232 to H-307; P-233 to H-307; G-234 to H-307; T-235 to H-307:; D-236 to H-307; Q-237 to H-307; L-238 to H-307; G-239 to H-307; M-240 to H-307; F-241 to H-307; T-242 to H-307; H-243 to H-307; K-244 to H-307; E-245 to H-307; F-246 to H-307; E-247 to H-307; Q-248 to H-307; L-249 to H-307; A-250 to H-307; P-251 to H-307; V-252 to H-307; L-253 to H-307; D-254 to H-307; G-255 to H-307; F-256 to H-307; S-257 to H-307; L-258 to H-307; M-259 to H-307; T-260 to H-307; Y-261 to H-307; D-262 to H-307; Y-263 to H-307; S-264 to H-307; T-265 to H-307; A-266 to H-307; H-267 to H-307; Q-268 to H-307; P-269 to H-307; G-270 to H-307; P-271 to H-307; N-272 to H-307; A-273 to H-307; P-274 to H-307; L-275 to H-307; S-276 to H-307; W-277 to H-307; V-278 to H-307; R-279 to H-307; A-280 to H-307; C-281 to H-307; V-282 to H-307; Q-283 to H-307; V-284 to H-307; L-285 to H-307; D-286 to H-307; P-287 to H-307; K-288 to H-307; S-289 to H-307; K-290 to H-307; W-291 to H-307; R-292 to H-307; S-293 to H-307; K-294 to H-307; I-295 to H-307; L-296 to H-307; L-297 to H-307; G-298 to H-307; L-299 to H-307; N-300 to H-307; F-301 to H-307; and Y-302 to H-307 of SEQ ID NO:1232. Polypeptides encoded by these polynucleotides are also encompassed by the invention.

[0236] Also as mentioned above, even if deletion of one or more amino acids from the C-terminus of a protein results in modification of loss of one or more biological functions of the protein (e.g., ability to inhibit the Mixed Lymphocyte Reaction), other functional activities (e.g., biological activities, ability to multimerize, ability to bind ligand, ability to generate antibodies, ability to bind antibodies) may still be retained. For example the ability of the shortened polypeptide to induce and/or bind to antibodies which recognize the complete or mature forms of the polypeptide generally will be retained when less than the majority of the residues of the complete or mature polypeptide are removed from the C-terminus. Whether a particular polypeptide lacking C-terminal residues of a complete polypeptide retains such immunologic activities can readily be determined by routine methods described herein and otherwise known in the art. It is not unlikely that a polypeptide with a large number of deleted C-terminal amino acid residues may retain some biological or immunogenic activities. In fact, peptides composed of as few as six amino acid residues may often evoke an immune response.

[0237] Accordingly, the present invention further provides polypeptides having one or more residues deleted from the carboxyl terminus of the amino acid sequence of the polypeptide shown in FIGS. 1A-B (SEQ ID NO:278), as described by the general formula 1-n, where n is an integer from 6 to 356, where n corresponds to the position of the amino acid residue identified in SEQ ID NO:278. More in particular, the invention provides polynucleotides encoding polypeptides comprising, or alternatively consisting of, an amino acid sequence selected from the group: K-23 to L-362; K-23 to L-361; K-23 to D-360; K-23 to Y-359; K-23 to F-358; K-23 to Y-357; K-23 to D-356; K-23 to L-355; K-23 to G-354; K-23 to Q-353; K-23 to G-352; K-23 to L-351; K-23 to E-350; K-23 to W-349; K-23 to I-348; K-23 to S-347; K-23 to V-346; K-23 to G-345; K-23 to V-344; K-23 to G-343; K-23 to L-342; K-23 to E-341; K-23 to R-340; K-23 to A-339; K-23 to L-338; K-23 to L-337; K-23 to L-336; K-23 to R-335; K-23 to V-334; K-23 to Q-333; K-23 to L-332; K-23 to S-331; K-23 to K-330; K-23 to L-329; K-23 to T-328; K-23 to P-327; K-23 to Y-326; K-23 to F-325; K-23 to V-324; K-23 to V-323; K-23 to H-322; K-23 to G-321; K-23 to G-320; K-23 to S-319; K-23 to R-318; K-23 to S-317; K-23 to K-316; K-23 to K-315; K-23 to Y-314; K-23 to E-313; K-23 to F-312; K-23 to F-311; K-23 to H-310; K-23 to E-309; K-23 to S-308; K-23 to X-307; K-23 to Q-306; K-23 to 5-305; K-23 to D-304; K-23 to W-303; K-23 to V-302; K-23 to M-301; K-23 to R-300; K-23 to P-299; K-23 to R-298; K-23 to H-297; K-23 to D-296; K-23 to K-295; K-23 to L-294; K-23 to T-293; K-23 to Q-292; K-23 to I-291; K-23 to Y-290; K-23 to R-289; K-23 to A-288; K-23 to G-287; K-23 to V-286; K-23 to V-285; K-23 to P-284; K-23 to E-283; K-23 to R-282; K-23 to A-281; K-23 to D-280; K-23 to K-279; K-23 to S-278; K-23 to T-277; K-23 to A-276; K-23 to Y-275; K-23 to D-274; K-23 to M-273; K-23 to G-272; K-23 to Y-271; K-23 to F-270; K-23 to N-269; K-23 to L-268; K-23 to G-267; K-23 to L-266; K-23 to L-265; K-23 to I-264; K-23 to K-263; K-23 to S-262; K-23 to R-261; K-23 to W-260; K-23 to K-259; K-23 to S-258; K-23 to K-257; K-23 to P-256; K-23 to D-255; K-23 to L-254; K-23 to V-253; K-23 to Q-252; K-23 to V-251; K-23 to C-250; K-23 to A-249; K-23 to R-248; K-23 to V-247; K-23 to W-246; K-23 to S-245; K-23 to L-244; K-23 to P-243; K-23 to A-242; K-23 to N-241; K-23 to P-240; K-23 to G-239; K-23 to P-238; K-23 to Q-237; K-23 to H-236; K-23 to A-235; K-23 to T-234; K-23 to S-233; K-23 to Y-232; K-23 to D-231; K-23 to Y-230; K-23 to T-229; K-23 to M-228; K-23 to L-227; K-23 to S-226; K-23 to F-225; K-23 to G-224; K-23 to D-223; K-23 to L-222; K-23 to V-221; K-23 to P-220; K-23 to A-219; K-23 to L-218; K-23 to Q-217; K-23 to E-216; K-23 to F-215; K-23 to E-214; K-23 to K-213; K-23 to H-212; K-23 to T-211; K-23 to F-210; K-23 to M-209; K-23 to G-208; K-23 to L-207; K-23 to Q-206; K-23 to D-205; K-23 to T-204; K-23 to V-203; K-23 to R-202; K-23 to K-201; K-23 to Q-200; K-23 to S-199; K-23 to L-198; K-23 to L-197; K-23 to Q-196; K-23 to N-195; K-23 to W-194; K-23 to V-193; K-23 to E-192; K-23 to V-191; K-23 to V-190; K-23 to F-189; K-23 to G-188; K-23 to D-187; K-23 to F-186; K-23 to H-185; K-23 to Q-184; K-23 to N-183; K-23 to K-182; K-23 to A-181; K-23 to V-180; K-23 to Q-179; K-23 to V-178; K-23 to V-177; K-23 to T-176; K-23 to K-175; K-23 to S-174; K-23 to L-173; K-23 to E-172; K-23 to E-171; K-23 to I-170; K-23 to E-169; K-23 to D-168; K-23 to E-167; K-23 to S-166; K-23 to D-165; K-23 to L-164; K-23 to V-163; K-23 to N-162; K-23 to R-161; K-23 to F-160; K-23 to D-159; K-23 to D-158; K-23 to Y-157; K-23 to T-156; K-23 to W-155; K-23 to D-154; K-23 to E-153; K-23 to F-152; K-23 to L-151; K-23 to L-150; K-23 to R-149; K-23 to P-148; K-23 to V-147; K-23 to I-146; K-23 to H-145; K-23 to L-144; K-23 to G-143; K-23 to K-142; K-23 to A-141; K-23 to H-140; K-23 to K-139; K-23 to R-138; K-23 to V-137; K-23 to A-136; K-23 to R-135; K-23 to M-134; K-23 to W-133; K-23 to G-132; K-23 to Q-131; K-23 to D-130; K-23 to v-129; K-23 to D-128; K-23 to G-127; K-23 to L-126; K-23 to G-125; K-23 to T-124; K-23 to V-123; K-23 to E-122; K-23 to F-121; K-23 to M-120; K-23 to E-119; K-23 to R-118; K-23 to G-117; K-23 to R-116; K-23 to R-115; K-23 to K-114; K-23 to L-113; K-23 to Q-112; K-23 to L-111; K-23 to W-110; K-23 to V-109; K-23 to P-108; K-23 to V-107; K-23 to I-106; K-23 to Q-105; K-23 to T-104; K-23 to F-103; K-23 to K-102; K-23 to S-101; K-23 to G-100; K-23 to F-99; K-23 to V-98; K-23 to K-97; K-23 to T-96; K-23 to V-95; K-23 to D-94; K-23 to Y-93; K-23 to G-92; K-23 to H-91; K-23 to S-90; K-23 to N-89; K-23 to W-88; K-23 to P-87; K-23 to T-86; K-23 to V-85; K-23 to Y-84; K-23 to G-83; K-23 to L-82; K-23 to V-81; K-23 to D-80; K-23 to G-79; K-23 to A-78; K-23 to F-77; K-23 to H-76; K-23 to R-75; K-23 to D-74; K-23 to R-73; K-23 to A-72; K-23 to K-71; K-23 to A-70; K-23 to S-69; K-23 to C-68; K-23 to Y-67; K-23 to S-66; K-23 to R-65; K-23 to H-64; K-23 to E-63; K-23 to I-62; K-23 to V-61; K-23 to V-60; K-23 to S-59; K-23 to E-58; K-23 to A-57; K-23 to K-56; K-23 to L-55; K-23 to D-54; K-23 to T-53; K-23 to V-52; K-23 to V-51; K-23 to L-50; K-23 to G-49; K-23 to R-48; K-23 to D-47; K-23 to Q-46; K-23 to V-45; K-23 to P-44; K-23 to K-43; K-23 to D-42; K-23 to S-41; K-23 to F-40; K-23 to Q-39; K-23 to S-38; K-23 to K-37; K-23 to E-36; K-23 to L-35; K-23 to L-34; K-23 to 1′-33; K-23 to K-32; K-23 to S-31; K-23 to A-30; and K-23 to A-29 of SEQ ID NO:278. Polypeptides encoded by these polynucleotides are also encompassed by the invention.

[0238] Additionally, the invention provides polynucleotides encoding polypeptides comprising, or alternatively consisting of, an amino acid sequence selected from the group: K-23 to R-306; K-23 to S-305; K-23 to T-304; K-23 to G-303; K-23 to Y-302; K-23 to F-301; K-23 to N-300; K-23 to L-299; K-23 to G-298; K-23 to L-297; K-23 to L-296; K-23 to I-295; K-23 to K-294; K-23 to S-293; K-23 to R-292; K-23 to W-291; K-23 to K-290; K-23 to S-289; K-23 to K-288; K-23 to P-287; K-23 to D-286; K-23 to L-285; K-23 to V-284; K-23 to Q-283; K-23 to V-282; K-23 to C-281; K-23 to A-280; K-23 to R-279; K-23 to V-278; K-23 to W-277; K-23 to S-276; K-23 to L-275; K-23 to P-274; K-23 to A-273; K-23 to N-272; K-23 to P-271; K-23 to G-270; K-23 to P-269; K-23 to Q-268; K-23 to I-267; K-23 to A-266; K-23 to T-265; K-23 to S-264; K-23 to Y-263; K-23 to D-262; K-23 to Y-261; K-23 to T-260; K-23 to M-259; K-23 to L-258; K-23 to S-257; K-23 to F-256; K-23 to G-255; K-23 to D-254; K-23 to L-253; K-23 to V-252; K-23 to P-251; K-23 to A-250; K-23 to L-249; K-23 to Q-248; K-23 to E-247; K-23 to F-246; K-23 to E-245; K-23 to K-244; K-23 to H-243; K-23 to T-242; K-23 to F-241; K-23 to M-240; K-23 to G-239; K-23 to L-238; K-23 to Q-237; K-23 to D-236; K-23 to T-235; K-23 to (−234; K-23 to P-233; K-23 to T-232; K-23 to I-231; K-23 to A-230; K-23 to P-229; K-23 to P-228; K-23 to I-227; K-23 to V-226; K-23 to L-225; K-23 to L-224; K-23 to A-223; K-23 to L-222; K-23 to L-221; K-23 to R-220; K-23 to A-219; K-23 to Q-218; K-23 to H-217; K-23 to L-216; K-23 to A-215; K-23 to E-214; K-23 to A-213; K-23 to L-212; K-23 to H-211; K-23 to T-210; K-23 to L-209; K-23 to M-208; K-23 to H-207; K-23 to I-206; K-23 to L-205; K-23 to G-204; K-23 to V-203; K-23 to R-202; K-23 to K-201; K-23 to Q-200; K-23 to S-199; K-23 to L-198; K-23 to L-197; K-23 to Q-196; K-23 to N-195; K-23 to W-194; K-23 to V-193; K-23 to E-192; K-23 to V-191; K-23 to V-190; K-23 to F-189; K-23 to G-188; K-23 to D-187; K-23 to F—186; K-23 to H-185; K-23 to Q-184; K-23 to N-183; K-23 to K-182; K-23 to A-181; K-23 to V-180; K-23 to Q-179; K-23 to V-178; K-23 to V-177; K-23 to T-176; K-23 to K-175; K-23 to S-174; K-23 to L-173; K-23 to E-172; K-23 to E-171; K-23 to I-170; K-23 to E-169; K-23 to D-168; K-23 to E-167; K-23 to S-166; K-23 to D-165; K-23 to L-164; K-23 to V-163; K-23 to N-162; K-23 to R-161; K-23 to F-160; K-23 to D-159; K-23 to D-158; K-23 to Y-157; K-23 to T-156; K-23 to W-155; K-23 to D-154; K-23 to E-153; K-23 to F-152; K-23 to L-151; K-23 to L-150; K-23 to R-149; K-23 to P-148; K-23 to V-147; K-23 to I-146; K-23 to H-145; K-23 to L-144; K-23 to G-143; K-23 to K-142; K-23 to A-141; K-23 to H-140; K-23 to K-139; K-23 to R-138; K-23 to V-137; K-23 to A-136; K-23 to R-135; K-23 to M-134; K-23 to W-133; K-23 to G-132; K-23 to Q-131; K-23 to D-130; K-23 to V-129; K-23 to D-128; K-23 to L-127; K-23 to L-126; K-23 to G-125; K-23 to T-124; K-23 to V-123; K-23 to E-122; K-23 to F-121; K-23 to M-120; K-23 to E-119; K-23 to R-118; K-23 to G-117; K-23 to R-116; K-23 to R-115; K-23 to K-114; K-23 to L-113; K-23 to Q-112; K-23 to L-111; K-23 to W-110; K-23 to V-109; K-23 to P-108; K-23 to S-107; K-23 to I-106; K-23 to Q-105; K-23 to T-104; K-23 to F-103; K-23 to K-102; K-23 to S-101; K-23 to G-100; K-23 to F-99; K-23 to V-98; K-23 to K-97; K-23 to T-96; K-23 to V-95; K-23 to D-94; K-23 to Y-93; K-23 to G-92; K-23 to H-91; K-23 to S-90; K-23 to N-89; K-23 to W-88; K-23 to P-87; K-23 to T-86; K-23 to V-85; K-23 to Y-84; K-23 to G-83; K-23 to L-82; K-23 to V-81; K-23 to D-80; K-23 to G-79; K-23 to A-78; K-23 to F-77; K-23 to H-76; K-23 to R-75; K-23 to D-74; K-23 to R-73; K-23 to A-72; K-23 to K-71; K-23 to A-70; K-23 to S-69; K-23 to C-68; K-23 to Y-67; K-23 to S-66; K-23 to R-65; K-23 to H-64; K-23 to E-63; K-23 to L-62; K-23 to V-61; K-23 to V-60; K-23 to S-59; K-23 to E-58; K-23 to A-57; K-23 to K-56; K-23 to L-55; K-23 to D-54; K-23 to T-53; K-23 to V-52; K-23 to V-51; K-23 to L-50; K-23 to G-49; K-23 to R-48; K-23 to D-47; K-23 to Q-46; K-23 to V-45; K-23 to P-44; K-23 to K-43; K-23 to D-42; K-23 to S-41; K-23 to F-40; K-23 to Q-39; K-23 to S-38; K-23 to K-37; K-23 to E-36; K-23 to L-35; K-23 to L-34; K-23 to T-33; K-23 to K-32; K-23 to S-31; K-23 to A-30; and K-23 to A-29 of SEQ ID NO:1232. Polypeptides encoded by these polynucleotides are also encompassed by the invention.

[0239] In addition, any of the above listed N- or C-terminal deletions can be combined to produce a N- and C-terminal deleted polypeptide. The invention also provides polypeptides comprising, or alternatively consisting of, one or more amino acids deleted from both the amino and the carboxyl termini, which may be described generally as having residues m-n of SEQ ID NO:278, where n and m are integers as described above. Polynucleotides encoding these polypeptides are also encompassed by the invention.

[0240] The present invention is also directed to proteins containing polypeptides at least 80%, 85%, 90%, 92%, 93%, 94%, 95%, 96%, 97%, 98% or 99% identical to a polypeptide sequence set forth herein as m-n. In preferred embodiments, the application is directed to proteins containing polypeptides at least 80%, 85%, 90%, 95%, 96%, 97%, 98% or 99% identical to polypeptides having the amino acid sequence of the specific N- and C-terminal deletions recited herein. Polynucleotides encoding these polypeptides are also encompassed by the invention.

[0241] Also included are polynucleotide sequences encoding a polypeptide consisting of a portion of the complete amino acid sequence encoded by a cDNA clone contained in ATCC Deposit No. 209080, where this portion excludes any integer of amino acid residues from 1 to about 356 amino acids from the amino terminus of the complete amino acid sequence encoded by a cDNA clone contained in ATCC Deposit No. 209080, or any integer of amino acid residues from 1 to about 356 amino acids from the carboxyl terminus, or any combination of the above amino terminal and carboxyl terminal deletions, of the complete amino acid sequence encoded by the cDNA clone contained in ATCC Deposit No. 209080. Polypeptides encoded by these polynucleotides also are encompassed by the invention.

[0242] As described herein or otherwise known in the art, the polynucleotides of the invention have uses that include, but are not limited to, serving as probes or primers in chromosome identification, chromosome mapping, and linkage analysis. The gene encoding the disclosed cDNA is thought to reside on chromosome 11. Accordingly, polynucleotides related to this invention have uses, such as, for example, as a marker in linkage analysis for chromosome 11.

[0243] Polynucleotides and polypeptides of the invention are useful as reagents for differential identification of the tissue(s) or cell type(s) present in a biological sample and for diagnosis of diseases and conditions which include, but are not limited to, immune and gastrointestinal disorders and cancer. Similarly, polypeptides and antibodies directed to these polypeptides are useful in providing immunological probes for differential identification of the tissue(s) or cell type(s). For a number of disorders of the above tissues or cells, particularly of the immune and gastrointestinal systems, expression of this gene at significantly higher or lower levels may be routinely detected in certain tissues or cell types (e.g. immune, cancerous and wounded tissues) or bodily fluids (e.g., lymph, serum, plasma, urine, synovial fluid and spinal fluid) or another tissue or cell sample taken from an individual having such a disorder, relative to the standard gene expression level, i.e., the expression level in healthy tissue or bodily fluid from an individual not having the disorder.

[0244] When tested against Jurkat cell lines, supernatants removed from cells expressing this gene activated the nuclear-factor kB (NF-kB) transcription factor. Thus, it is likely that this gene activates Jurkat cells by activating a transcriptional factor found within these cells. Nuclear factor kB is a transcription factor activated by a wide variety of agents, leading to cell activation, differentiation, or apoptosis. Reporter constructs utilizing the NF-kB promoter element were used to screen supernatants for such activity.

[0245] Additionally, products of this gene have been found to inhibit the Mixed Lymphocyte Reaction (MLR). This assay is described in Example 58 herein. Inhibition of a MLR may be due to a direct effect on cell proliferation and viability, modulation of costimulatory molecules on interacting cells, modulation of adhesiveness between lymphocytes and accessory cells, or modulation of cytokine production by accessory cells. Multiple cells may be targeted by these polypeptides since the peripheral blood mononuclear fraction used in this assay includes T, B and natural killer lymphocytes, as well as monocytes and dendritic cells.

[0246] The tissue distribution in immune cells (e.g., T-cells, macrophages) and inhibition of the MLR indicates that the polynucleotides and polypeptides corresponding to this gene are useful for the diagnosis, treatment, and/or prevention of many diseases associated with lymphocyte and monocyte activation or proliferation. These include, but are not limited to, diseases such as asthma, arthritis, diabetes, inflammatory skin conditions, psoriasis, eczema, systemic lupus erythematosus, multiple sclerosis, glomerulonephritis, inflammatory bowel disease, Crohn's disease, ulcerative colitis, arteriosclerosis, cirrhosis, graft vs. host disease, host vs. graft disease, hepatitis, leukemia and lymphoma. Since the gene is expressed in cells of lymphoid origin, the natural gene product may be involved in immune functions. Therefore, polynucleotides and polypeptides of the invention (including fragments, variants, and derivatives) may be also used to treat, prevent and/or diagnose immunological disorders including, but not limited to, arthritis, asthma, immunodeficiency diseases such as AIDS, leukemia, rheumatoid arthritis, granulomatous disease, inflammatory bowel disease, sepsis, acne, neutropenia, neutrophilia, psoriasis, hypersensitivities, such as T-cell mediated cytotoxicity; immune reactions to transplanted organs and tissues, such as host-versus-graft and graft-versus-host diseases, or autoimmunity disorders, such as autoimmune infertility, lens tissue injury, demyelination, systemic lupus erythematosis, drug induced hemolytic anemia, rheumatoid arthritis, Sjogren's disease, and scleroderma.

[0247] The tissue distribution in human T-cells and human colon carcinoma indicates that the polynucleotides and polypeptides corresponding to this gene are useful for the diagnosis, treatment, and/or prevention of immune disorders and gastrointestinal diseases. Non-limiting representative uses for these polynucleotides and polypeptides are described in the “Immune Activity” and “Infectious Disease” sections below, in Example 11, 13, 14, 16, 18, 19, 20, and 27, and elsewhere herein. Furthermore, this gene product may be involved in the regulation of cytokine production, antigen presentation, or other processes that may also suggest a usefulness in the treatment of cancer (e.g. by boosting immune responses). Since the gene is expressed in cells of lymphoid origin, the gene or protein, as well as, antibodies directed against the protein may as be useful as a tumor marker and/or immunotherapy targets for the above listed tissues. In addition, polynucleotides and polypeptides of the invention may have commercial utility in the expansion of stem cells and committed progenitors of various blood lineages, in the differentiation and/or proliferation of various cell types (e.g., T, B and natural killer lymphocytes, monocytes, dendritic cells), modulation of costimulatory molecules on interacting cells, modulation of adhesiveness between lymphocytes and accessory cells, and/or modulation of cytokine production by accessory cells.

[0248] Furthermore, the protein may also be used to determine biological activity, to raise antibodies, as tissue markers, to isolate cognate ligands or receptors, to identify agents that modulate their interactions, in addition to its use as a nutritional supplement.

[0249] Many polynucleotide sequences, such as EST sequences, are publicly available and accessible through sequence databases. Some of these sequences are related to SEQ ID NO:40 and may have been publicly available prior to conception of the present invention. Preferably, such related polynucleotides are specifically excluded from the scope of the present invention. To list every related sequence is cumbersome. Accordingly, preferably excluded from the present invention are one or more polynucleotides comprising a nucleotide sequence described by the general formula of a-b, where a is any integer between 1 to 1501 of SEQ ID NO:40, b is an integer of 15 to 1515, where both a and b correspond to the positions of nucleotide residues shown in SEQ ID NO:40, and where b is greater than or equal to a+14.

[0250] Features of Protein Encoded by Gene No: 31

[0251] The translation product of this gene shares sequence homology with Ribosomal protein L11 of Caenorhabditis elegans. (See Genbank Accession No. 156201.)

[0252] In specific embodiments, polypeptides of the invention comprise, or alternatively consists of, an amino acid sequence selected from the group:

(SEQ ID NO:564)

ERGVSINQFCKEFNERTKDIKEGIPLPTKILVKPDRTFEIKIGQPTVSYF
LKAAAGI EKGARQTGKEVAGLVTLKHVYEIARIKAQDEAFALQDVPLSS
VVRSIIGSARSLGIRVVKDLSSEELAAF QKERAIFLAAQKEADLAAQEE
AAKK,

(SEQ ID NO:565)

ERGVSINQFCKEFNERTKDIKEGIPLPTKILVKPDRTFEIKIGQPTVSYF
L,

(SEQ ID NO:566)

KAAAGIEKGARQTGKEVAGLVTLKHVYEIARIKAQDEAFALQDVPLSSV,
and/or

(SEQ ID NO:567)

VRSIIGSARSLGIRVVKDLSSEELAAFQKERAIFLAAQKEADLAAQEEAA
KK.

[0253] Moreover, fragments and variants of these polypeptides (such as, for example, fragments as described herein, polypeptides at least 80%, 85%, 90%, 95%, 96%, 97%, 98%, or 99% identical to these polypeptides and polypeptides encoded by the polynucleotide which hybridizes, under stringent conditions, to the polynucleotide encoding these polypeptides) are encompassed by the invention. Antibodies that bind polypeptides of the invention are also encompassed by the invention. Polynucleotides encoding these polypeptides are also encompassed by the invention.

[0254] The gene encoding the disclosed cDNA is thought to reside on chromosome 11. Accordingly, polynucleotides related to this invention are useful as a marker in linkage analysis for chromosome 11.

[0255] This gene is expressed in human embryo tissue, and to a lesser extent, in human epithelioid sarcoma.

[0256] Therefore, polynucleotides and polypeptides of the invention are useful as reagents for identification of the tissue(s) or cell type(s) present in a biological sample and for diagnosis of diseases and conditions which include, but are not limited to, development disorders and epithelial cell cancer. Similarly, polypeptides and antibodies directed to these polypeptides are useful in providing immunological probes for differential identification of the tissue(s) or cell type(s). For a number of disorders of the above tissues or cells, particularly of the embryonic and epithelial cell systems, expression of this gene at significantly higher or lower levels may be routinely detected in certain tissues or cell types (e.g. embryonic, cancerous and wounded tissues) or bodily fluids (e.g. lymph, serum, plasma, urine, synovial fluid and spinal fluid) or another tissue or cell sample taken from an individual having such a disorder, relative to the standard gene expression level, i.e., the expression level in healthy tissue or bodily fluid from an individual not having the disorder.

[0257] Predicted epitopes include those comprising a sequence shown in SEQ ID NO:279 as residues: Lys-34 to Gly-40.

[0258] The tissue distribution in human embryo indicates that the protein product of this gene is useful for the diagnosis and treatment of developmental disorders and epithelial cancer. Furthermore, expression within embryonic tissue and other cellular sources marked by proliferating cells indicates that this protein may play a role in the regulation of cellular division, and may show utility in the diagnosis and treatment of cancer and other proliferative disorders. Similarly, embryonic development also involves decisions involving cell differentiation and/or apoptosis in pattern formation. Thus this protein may also be involved in apoptosis or tissue differentiation and could again be useful in cancer therapy. Protein, as well as, antibodies directed against the protein may show utility as a tumor marker and/or immunotherapy targets for the above listed tissues.

[0259] Many polynucleotide sequences, such as EST sequences, are publicly available and accessible through sequence databases. Some of these sequences are related to SEQ ID NO:41 and may have been publicly available prior to conception of the present invention. Preferably, such related polynucleotides are specifically excluded from the scope of the present invention. To list every related sequence is cumbersome. Accordingly, preferably excluded from the present invention are one or more polynucleotides comprising a nucleotide sequence described by the general formula of a-b, where a is any integer between 1 to 690 of SEQ ID NO:41, b is an integer of 15 to 704, where both a and b correspond to the positions of nucleotide residues shown in SEQ ID NO:41, and where b is greater than or equal to a+14.

[0260] Features of Protein Encoded by Gene No: 32

[0261] This gene is expressed primarily in resting T-cells.

[0262] Polynucleotides and polypeptides of the invention are useful as reagents for differential identification of the tissue(s) or cell type(s) present in a biological sample and for diagnosis of diseases and conditions which include, but are not limited to, inflammatory and general immune disorders. Similarly, polypeptides and antibodies directed to these polypeptides are useful in providing immunological probes for differential identification of the tissue(s) or cell type(s). For a number of disorders of the above tissues or cells, particularly of the immune system, expression of this gene at significantly higher or lower levels may be routinely detected in certain tissues or cell types (e.g. immune, cancerous and wounded tissues) or bodily fluids (e.g. lymph, serum, plasma, urine, synovial fluid and spinal fluid) or another tissue or cell sample taken from an individual having such a disorder, relative to the standard gene expression level, i.e., the expression level in healthy tissue or bodily fluid from an individual not having the disorder.

[0263] The tissue distribution in T-cells indicates that the protein product of this gene is useful for the diagnosis and treatment of disorders of the immune system. Furthermore, this gene product may be involved in the regulation of cytokine production, antigen presentation, or other processes that may also suggest a usefulness in the treatment of cancer (e.g. by boosting immune responses). Since the gene is expressed in cells of lymphoid origin, the gene or protein, as well as, antibodies directed against the protein may show utility as a tumor marker and/or immunotherapy targets for the above listed tissues. Expression of this gene product in T cells also strongly indicates a role for this protein in immune function and immune surveillance.

[0264] Many polynucleotide sequences, such as EST sequences, are publicly available and accessible through sequence databases. Some of these sequences are related to SEQ ID NO:42 and may have been publicly available prior to conception of the present invention. Preferably, such related polynucleotides are specifically excluded from the scope of the present invention. To list every related sequence is cumbersome. Accordingly, preferably excluded from the present invention are one or more polynucleotides comprising a nucleotide sequence described by the general formula of a-b, where a is any integer between 1 to 1080 of SEQ ID NO:42, b is an integer of 15 to 1094, where both a and b correspond to the positions of nucleotide residues shown in SEQ ID NO:42, and where b is greater than or equal to a+14.

[0265] Features of Protein Encoded by Gene No: 33

[0266] This gene is believed to reside on chromosome 1. Accordingly, polynucleotides derived from this gene are useful in linkage analysis as chromosome 1 markers.

[0267] This gene is expressed primarily in prostate, and to a lesser extent in soares adult brain, human umbilical vein endothelial cells, and amniotic cells.

[0268] Polynucleotides and polypeptides of the invention are useful as reagents for differential identification of the tissue(s) or cell type(s) present in a biological sample and for diagnosis of diseases and conditions which include, but are not limited to, prostate-related disorders. Similarly, polypeptides and antibodies directed to these polypeptides are useful in providing immunological probes for differential identification of the tissue(s) or cell type(s). For a number of disorders of the above tissues or cells, particularly of the urinary system and nervous system expression of this gene at significantly higher or lower levels may be routinely detected in certain tissues or cell types (e.g. prostate, cancerous and wounded tissues) or bodily fluids (e.g. lymph, serum, plasma, urine, synovial fluid and spinal fluid) or another tissue or cell sample taken from an individual having such a disorder, relative to the standard gene expression level, i.e., the expression level in healthy tissue or bodily fluid from an individual not having the disorder.

[0269] The tissue distribution in prostate indicates that the protein products of this gene are useful for the diagnosis and treatment of disorders of the urinary and nervous systems. Furthermore, the tissue distribution indicates that the protein product of this gene is useful for the detection/treatment of neurodegenerative disease states and behavioral disorders such as Alzheimer's Disease, Parkinson's Disease, Huntington's Disease, Tourette's Syndrome, schizophrenia, mania, dementia, paranoia, obsessive compulsive disorder, panic disorder, learning disabilities, ALS, psychoses, autism, and altered behaviors, including disorders in feeding, sleep patterns, balance, and perception. Protein, as well as, antibodies directed against the protein may show utility as a tumor marker and/or immunotherapy targets for the above listed tissues.

[0270] Many polynucleotide sequences, such as EST sequences, are publicly available and accessible through sequence databases. Some of these sequences are related to SEQ ID NO:43 and may have been publicly available prior to conception of the present invention. Preferably, such related polynucleotides are specifically excluded from the scope of the present invention. To list every related sequence is cumbersome. Accordingly, preferably excluded from the present invention are one or more polynucleotides comprising a nucleotide sequence described by the general formula of a-b, where a is any integer between 1 to 1807 of SEQ ID NO:43, b is an integer of 15 to 1821, where both a and b correspond to the positions of nucleotide residues shown in SEQ ID NO:43, and where b is greater than or equal to a+14.

[0271] Features of Protein Encoded by Gene No): 34

[0272] This gene shares sequence homology with R05G6.4 gene product. (See Genbank Accession No. gi|1326338.) This gene also shares sequence homology with the cyclophilin-like protein CyP-60. (See Genbank Accession No. 1199598, see also Biochem. J. 314(1),313-319(1996).)

[0273] In specific embodiments, polypeptides of the invention comprise, or alternatively consists of, an amino acid sequence selected from the group:

(SEQ ID NO:568)

AVYTYHEKKKDTAASGYGTQNIRLSRDAVKDFDCCCLSLQPCHDPVVTPD
GYLYEREAILEYILHQKKEIARQMKAYEKQRGTRREEQKELQRAASQDHV
RGFLEKESAIVSRPLNPFTAKALSGTSPDDVQPGPSVGPPSKDKDKVLPS
FWIPSLTPEAKATKLEKPSRTVTCPMSGKPLRMSDLTPVHFTPLDSSVDR
VGLITRSERYVCAVTRDSLSNATPCAVLRPSGAVVTLECVEKLIRKDMVD
PVTGDKLTDRDIIVLQRGGT,

(SEQ ID NO:569)

YLYEREAILEYILHQKKEIARQMKAYEKQRGTRREEQKELQRAASQDHVR
GFLE,

(SEQ ID NO:570)

FTAKALSGTSPDDVQPGPSVGPPSKDKDKVLPSFWIPSLTPEAKATKLEK
PSRTVTCPMSGKPL,

(SEQ ID NO:571)

VHFTPLDSSVDRVGLITRSERYVCAVTRDSLSNATPCAVLRPSGAVVTLE
CVEKLI, and/or

(SEQ ID NO:572)

MSDLTPVHFTPLDSSVDRVGLITRSERYVCAVTRDSLSNATPCAVLRPSG
AVVTLECVEKLIRKDM.

[0274] Moreover, fragments and variants of these polypeptides (such as, for example, fragments as described herein, polypeptides at least 80%, 85%, 90%, 95%, 96%, 97%, 98%, or 99% identical to these polypeptides and polypeptides encoded by the polynucleotide which hybridizes, under stringent conditions, to the polynucleotide encoding these polypeptides) are encompassed by the invention. Antibodies that bind polypeptides of the invention are also encompassed by the invention. Polynucleotides encoding these polypeptides are also encompassed by the invention.

[0275] This gene is expressed primarily in human testis, and to a lesser extent in activated T-cells.

[0276] Polynucleotides and polypeptides of the invention are useful as reagents for differential identification of the tissue(s) or cell type(s) present in a biological sample and for diagnosis of diseases and conditions which include, but are not limited to, male reproductive disorders and in particular testicular cancer. Similarly, polypeptides and antibodies directed to these polypeptides are useful in providing immunological probes for differential identification of the tissue(s) or cell type(s). For a number of disorders of the above tissues or cells, particularly of the reproductive and immune systems, expression of this gene at significantly higher or lower levels may be routinely detected in certain tissues or cell types (e.g. testes, immune, cancerous and wounded tissues) or bodily fluids (e.g. lymph, serum, plasma, urine, synovial fluid and spinal fluid) or another tissue or cell sample taken from an individual having such a disorder, relative to the standard gene expression level, i.e., the expression level in healthy tissue or bodily fluid from an individual not having the disorder.

[0277] The tissue distribution in human testis indicates that the protein product of this gene is useful for the diagnosis and treatment of disorders of the male reproductive system, and in particular of testicular cancer. Furthermore, this gene is useful for the treatment and diagnosis of conditions concerning proper testicular function (e.g. endocrine function, sperm maturation), as well as cancer. Therefore, this gene product is useful in the treatment of male infertility and/or impotence. This gene product is also useful in assays designed to identify binding agents as such agents (antagonists) are useful as male contraceptive agents. Similarly, the protein is believed to by useful in the treatment and/or diagnosis of testicular cancer. The testes are also a site of active gene expression of transcripts that may be expressed, particularly at low levels, in other tissues of the body. Therefore, this gene product may be expressed in other specific tissues or organs where it may play related functional roles in other processes, such as hematopoiesis, inflammation, bone formation, and kidney function, to name a few possible target indications. Protein, as well as, antibodies directed against the protein may show utility as a tissue-specific marker and/or immunotherapy target for the above listed tissues.

[0278] Many polynucleotide sequences, such as EST sequences, are publicly available and accessible through sequence databases. Some of these sequences are related to SEQ ID NO:44 and may have been publicly available prior to conception of the present invention. Preferably, such related polynucleotides are specifically excluded from the scope of the present invention. To list every related sequence is cumbersome. Accordingly, preferably excluded from the present invention are one or more polynucleotides comprising a nucleotide sequence described by the general formula of a-b, where a is any integer between 1 to 1010 of SEQ ID NO:44, b is an integer of 15 to 1024, where both a and b correspond to the positions of nucleotide residues shown in SEQ ID NO:44, and where b is greater than or equal to a+14.

[0279] Features of Protein Encoded by Gene No: 35

[0280] The translation product of this gene shares sequence homology with Lpe5p of Saccharomyces cerevisiae, which is thought to be important in the metabolism of phospholipids. The gene encoding the disclosed cDNA is thought to reside on chromosome 8. Accordingly, polynucleotides related to this invention are useful as a marker in linkage analysis for chromosome 8.

[0281] This gene is expressed primarily in liver and brain.

[0282] Polynucleotides and polypeptides of the invention are useful as reagents for differential identification of the tissue(s) or cell type(s) present in a biological sample and for diagnosis of diseases and conditions which include, but are not limited to, metabolic disorders. Similarly, polypeptides and antibodies directed to these polypeptides are useful in providing immunological probes for differential identification of the tissue(s) or cell type(s). For a number of disorders of the above tissues or cells, particularly of the metabolic and nervous systems expression of this gene at significantly higher or lower levels may be routinely detected in certain tissues or cell types (e.g. liver, brain, cancerous and wounded tissues) or bodily fluids (e.g. lymph, serum, plasma, urine, synovial fluid and spinal fluid) or another tissue or cell sample taken from an individual having such a disorder, relative to the standard gene expression level, i.e., the expression level in healthy tissue or bodily fluid from an individual not having the disorder.

[0283] Predicted epitopes include those comprising a sequence shown in SEQ ID NO:283 as residues: Pro-14 to Leu-20, Lys-28 to Asn-38, Arg-109 to Arg-114, Lys-119 to Asn-124, Glu-152 to Leu-157, or Pro-172 to Val-180.

[0284] The tissue distribution in liver and brain, combined with the homology to Lpe5p of Saccharomyces cerevisiae indicates that the protein product of this gene is useful for the diagnosis and treatment of metabolic and nervous disorders. Additionally, the tissue distribution indicates that the protein product of this gene is useful for the detection and treatment of liver disorders and cancers (e.g. hepatoblastoma, jaundice, hepatitis, liver metabolic diseases and conditions that are attributable to the differentiation of hepatocyte progenitor cells). Protein, as well as, antibodies directed against the protein may show utility as a tumor marker and/or immunotherapy targets for the above listed tissues.

[0285] Many polynucleotide sequences, such as EST sequences, are publicly available and accessible through sequence databases. Some of these sequences are related to SEQ ID NO:45 and may have been publicly available prior to conception of the present invention. Preferably, such related polynucleotides are specifically excluded from the scope of the present invention. To list every related sequence is cumbersome. Accordingly, preferably excluded from the present invention are one or more polynucleotides comprising a nucleotide sequence described by the general formula of a-b, where a is any integer between 1 to 969 of SEQ ID NO:45, b is an integer of 15 to 983, where both a and b correspond to the positions of nucleotide residues shown in SEQ ID NO:45, and where b is greater than or equal to a+14.

[0286] Features of Protein Encoded by Gene No: 36

[0287] This gene shares sequence homology with the nuclear ribonucleoprotein U (HNRNP U), encoded by C. elegans (See Genbank Accession gi|1703576.).

[0288] In specific embodiments, polypeptides of the invention comprise, or alternatively consists of, an amino acid sequence selected from the group: MDTSENRPENDVPEPPMPIADQVSNDDRPEGSVEDEEKKESSLPKSFKRKISV VSATKGVPAGNSDTEGGQPGRKRRWGASTATTQKKPSISITTESLKSLIPDIKP LAGQEAVVDLHADDSRISEDETERNGDDGTHDKGLKICRTVTQVVPAEGQE NGQREEEEEEKEPEAEPPVPPQVSVEVALPPPAEHEVKKVTLGDTLTRRSISQ QKSGVSITIDDPVRTAQVPSPPRGKISNIVHISNLVRPFTLGQLKELLGRTGTLV EEAFWIDKIKSHCFVTYSTVEEAVATRTALHGVKWPQSNPKFLCADYAEQDE LDYHRGLLVDRPSETKTEEQGIPRPLHPPPPPPVQPPQHPRAEQREQERAVRE QWAEREREMERRERTRSEREWDRDKvVREGPRSRSRSRXRRRKERAKSKEK KSEKKEKAQEEPPAKLLDDLFRKTKAAPCIYWLPLTDSQIVQKEAERAERAK EREKRRKEQEEEEQKEREKEAERERNRQLEREKRREHSRERDRERERERERD RGDRDRDRERDRERGRERDRRDTKRHSRSRSRSTPVRDRGGR (SEQ ID NO:573), ENDVPEPPMPIADQVSNDDRPEGSVEDEEKKESSLPKSFKRKISVVSA (SEQ ID NO:574), VDLHADDSRISEDETERNGDDGTHDKGLKICRTVTQV (SEQ ID NO:575), PQVSVEVALPPPAEHEVKKVTLGDTLTRRSISQQKSGVSITIDDPVRTAQVPSP P (SEQ ID NO:576), LKELLGRTGTLVEEAFWIDKIKSHCFVTYSTVEEAVATRTALHGVKWPQSNP KFL (SEQ ID NO:577), VDRPSETKTEEQGIPRPLHPPPPPPVQPPQHPRAEQREQERAVREQWAERERE (SEQ ID NO:578), EWDRDKVREGPRSRSRSRXRRRKERAKSKEKKSEKKEKAQEEPPAKLLDDLF RKTKAAP (SEQ ID NO:579), LDVPLASRSPEFPLPLMTQSELPRCPPHPGAR (SEQ ID NO:581), LATLSISPIWSVLSL (SEQ ID NO:582), and PLTDSQIVQKEAERAERAKEREKRRKEQEEEEQKEREKEAERERNRQLEREK RREHSRERDRER (SEQ ID NO:580). Moreover, fragments and variants of these polypeptides (such as, for example, fragments as described herein, polypeptides at least 80%, 85%, 90%, 95%, 96%, 97%, 98%, or 99% identical to these polypeptides and polypeptides encoded by the polynucleotide which hybridizes, under stringent conditions, to the polynucleotide encoding these polypeptides) are encompassed by the invention. Antibodies that bind polypeptides of the invention are also encompassed by the invention. Polynucleotides encoding these polypeptides are also encompassed by the invention.

[0289] An additional embodiment is the polynucleotides encoding these polypeptides. The gene encoding the disclosed cDNA is thought to reside on chromosome 14. Accordingly, polynucleotides related to this invention are useful as a marker in linkage analysis for chromosome 14.

[0290] This gene is expressed primarily in epididymus, and to a lesser extent in testes.

[0291] Polynucleotides and polypeptides of the invention are useful as reagents for differential identification of the tissue(s) or cell type(s) present in a biological sample and for diagnosis of diseases and conditions which include, but are not limited to, diseases of the male reproductive system. Similarly, polypeptides and antibodies directed to these polypeptides are useful in providing immunological probes for differential identification of the tissue(s) or cell type(s). For a number of disorders of the above tissues or cells, particularly of the male reproductive system, expression of this gene at significantly higher or lower levels may be routinely detected in certain tissues or cell types (e.g. epididymus, testes, cancerous and wounded tissues) or bodily fluids (e.g. lymph, serum, plasma, urine, synovial fluid and spinal fluid) or another tissue or cell sample taken from an individual having such a disorder, relative to the standard gene expression level, i.e., the expression level in healthy tissue or bodily fluid from an individual not having the disorder.

[0292] The tissue distribution in epididymus and testes indicates that the protein product of this gene is useful for the diagnosis and treatment of male reproductive disorders. Furthermore, the protein product of this gene is useful for the treatment and diagnosis of conditions concerning proper reproductive and testicular function (e.g. endocrine function, sperm maturation), as well as cancer. Therefore, this gene product is useful in the treatment of male infertility and/or impotence. This gene product is also useful in assays designed to identify binding agents as such agents (antagonists) are useful as male contraceptive agents. Similarly, the protein is believed to by useful in the treatment and/or diagnosis of testicular cancer. The testes are also a site of active gene expression of transcripts that may be expressed, particularly at low levels, in other tissues of the body. Therefore, this gene product may be expressed in other specific tissues or organs where it may play related functional roles in other processes, such as hematopoiesis, inflammation, bone formation, and kidney function, to name a few possible target indications.

[0293] Features of Protein Encoded by Gene No: 37

[0294] This gene is expressed primarily in amygdala.

[0295] Polynucleotides and polypeptides of the invention are useful as reagents for differential identification of the tissue(s) or cell type(s) present in a biological sample and for diagnosis of diseases and conditions which include, but are not limited to, inflammatory diseases and reproductive disorders. Similarly, polypeptides and antibodies directed to these polypeptides are useful in providing immunological probes for differential identification of the tissue(s) or cell type(s). For a number of disorders of the above tissues or cells, particularly of the amygdala, expression of this gene at significantly higher or lower levels may be routinely detected in certain tissues or cell types (e.g. brain, cancerous and wounded tissues) or bodily fluids (e.g. lymph, serum, plasma, urine, synovial fluid and spinal fluid) or another tissue or cell sample taken from an individual having such a disorder, relative to the standard gene expression level, i.e., the expression level in healthy tissue or bodily fluid from an individual not having the disorder.

[0296] The tissue distribution in amygdala indicates that the protein product of this gene is useful for the diagnosis and treatment of inflammatory diseases and neural disorders. The amygdala processes sensory information and relays this to other areas of the brain including the endocrine and autonomic domains of the hypothalamus and the brain stem. Protein, as well as, antibodies directed against the protein may show utility as a tumor marker and/or immunotherapy targets for the above listed tissues.

[0297] Many polynucleotide sequences, such as EST sequences, are publicly available and accessible through sequence databases. Some of these sequences are related to SEQ ID NO:47 and may have been publicly available prior to conception of the present invention. Preferably, such related polynucleotides are specifically excluded from the scope of the present invention. To list every related sequence is cumbersome. Accordingly, preferably excluded from the present invention are one or more polynucleotides comprising a nucleotide sequence described by the general formula of a-b, where a is any integer between 1 to 826 of SEQ ID NO:47, b is an integer of 15 to 840, where both a and b correspond to the positions of nucleotide residues shown in SEQ ID NO:47, and where b is greater than or equal to a+14.

[0298] Features of Protein Encoded by Gene No: 38

[0299] This gene shares sequence homology with human opsonin protein P35 fragment. (See Genbank Accession No. R94181.) The opsonin protein activates the phagocytosis of pathogenic microbes by phagocytic cells which indicates that the protein product of this gene may be useful in the treatment and/or prevention of a variety of immune conditions, particularly bacterial infections and antigen presentation.

[0300] In specific embodiments, polypeptides of the invention comprise, or alternatively consists of, an amino acid sequence selected from the group: GCDSCPPHLPREAFAQDTQAEGECSSRAERADMCPDAPPSQEVPEGPGAAP (SEQ ID NO:583), RGWLPSSCLSCALRVCPDSSSTQAMGMLLAFWLPGASWQEAARGQYSEDED TDTDEYKEAKASINPVTGRVEEKPPNPMEGMTEEQKEHEA (SEQ ID NO:584), and/or TQAMGMLLAFWLPGASWQEAARGQYSE (SEQ ID NO:585). Moreover, fragments and variants of these polypeptides (such as, for example, fragments as described herein, polypeptides at least 80%, 85%, 90%, 95%, 96%, 97%, 98%, or 99% identical to these polypeptides and polypeptides encoded by the polynucleotide which hybridizes, under stringent conditions, to the polynucleotide encoding these polypeptides) are encompassed by the invention. Antibodies that bind polypeptides of the invention are also encompassed by the invention. Polynucleotides encoding these polypeptides are also encompassed by the invention.

[0301] This gene is expressed in immune-related tissues such as thymus, macrophage, and T cells.

[0302] Polynucleotides and polypeptides of the invention are useful as reagents for differential identification of the tissue(s) or cell type(s) present in a biological sample and for diagnosis of diseases and conditions which include, but are not limited to, immune disorders and infectious diseases. Similarly, polypeptides and antibodies directed to these polypeptides are useful in providing immunological probes for differential identification of the tissue(s) or cell type(s). For a number of disorders of the above tissues or cells, particularly of the immune system, expression of this gene at significantly higher or lower levels may be routinely detected in certain tissues or cell types (e.g., immune, hematopoietic, and cancerous and wounded tissues) or bodily fluids (e.g., lymph, serum, plasma, urine, synovial fluid and spinal fluid) or another tissue or cell sample taken from an individual having such a disorder, relative to the standard gene expression level, i.e., the expression level in healthy tissue or bodily fluid from an individual not having the disorder.

[0303] Predicted epitopes include those comprising a sequence shown in SEQ ID NO:286 as residues: Lys-9 to Arg-14, or Met-38 to Asp-51.

[0304] The tissue distribution in immune tissues, particularly macrophages, combined with the homology to a conserved human opsonin protein indicates that the protein product of this gene is useful for diagnosis and treatment of immune disorders, as well as the treatment and/or diagnosis of infectious disease. Moreover, the gene product may be involved in the regulation of cytokine production, antigen presentation, or other processes that may also suggest a usefulness in the treatment of cancer (e.g. by boosting immune responses). Since the gene is expressed in cells of lymphoid origin, the natural gene product may be involved in immune functions. Therefore it may be also used as an agent for immunological disorders including arthritis, asthma, immunodeficiency diseases such as AID, leukemia, rheumatoid arthritis, granulomatous disease, inflammatory bowel disease, sepsis, acne, neutropenia, neutrophilia, psoriasis, hypersensitivities, such as T-cell mediated cytotoxicity; immune reactions to transplanted organs and tissues, such as host-versus-graft and graft-versus-host diseases, or autoimmunity disorders, such as autoimmune infertility, lens tissue injury, demyelination, systemic lupus erythematosis, drug induced hemolytic anemia, rheumatoid arthritis, Sjogren's disease, scleroderma and tissues. In addition, this gene product may have commercial utility in the expansion of stem cells and committed progenitors of various blood lineages, and in the differentiation and/or proliferation of various cell types. Protein, as well as, antibodies directed against the protein may show utility as a tumor marker and/or immunotherapy targets for the above listed tissues.

[0305] Many polynucleotide sequences, such as EST sequences, are publicly available and accessible through sequence databases. Some of these sequences are related to SEQ ID NO:48 and may have been publicly available prior to conception of the present invention. Preferably, such related polynucleotides are specifically excluded from the scope of the present invention. To list every related sequence is cumbersome. Accordingly, preferably excluded from the present invention are one or more polynucleotides comprising a nucleotide sequence described by the general formula of a-b, where a is any integer between 1 to 2418 of SEQ ID NO:48, b is an integer of 15 to 2432, where both a and b correspond to the positions of nucleotide residues shown in SEQ ID NO:48, and where b is greater than or equal to a+14.

[0306] Features of Protein Encoded by Gene No: 39

[0307] The translation product of this gene shares sequence homology with alpha-2 type I collagen which is thought to be important in tissue repair. (See, e.g., Genbank Accession No. 211607.)

[0308] In specific embodiments, polypeptides of the invention comprise, or alternatively consists of, an amino acid sequence selected from the group: PQLPSCGRPWPGTASVFQSHTQGPREDPDPCRAQGSAGTHCPISLSPPRQ (SEQ ID NO:586), KTHPRALWSAGPSCALCPGGSGXTSPPQGAPRGIXWDRCPQIQVLEGQRVRF PSQPQHPSHLAPRGGCGWRPDSRPLLPTPSGLSSFFPLDA QCWPWRTVSWR (SEQ ID NO:587), AGAPGQQARLQYLLSFQGEGAPHEXGATGEGGDGAWEACXCXRCLLNWQA GGWGLQLSLMWLHRGPLRPPGVRWTPWAFLEACSWGPALSLLGSGHSLPGT HEQAAWSRGCGQHGQSPTQKCKSSKEPLAQAPPWDSPAAPPHQGFADVLER PTLEPFGVLAPPVPSALVEAAXQVLLREPQGGFXGTAAHRSRCWKGSG (SEQ ID NO:588), MQLLFLLPHPSPQLHASLPHSAALPCPRGESLTTASPAGAAGRXDAVPRCRH QAGRGWVPRGPCERGGGDRGKPRAVAWDXGSLRWAVWSARAGQGRS SEP APLASRRGYSTCCLSRGKGLPMRXGRRGRGVMVPGKPACAXGAC (SEQ ID NO:589), QHPSHLAPRGGCGWRPDSRPLLPTPSGLSSFFPL (SEQ ID NO:590), GVRWTPWAFLEACSWGPALSLLGSGHSLPG (SEQ ID NO:591), WDSPAAPPHQGFADVLERPTLEPFGVLA (SEQ ID NO:592), and/or RSSEPAPLASRRGYSTCCLSRGKGL PMR (SEQ ID NC):593). Moreover, fragments and variants of these polypeptides (such as, for example, fragments as described herein, polypeptides at least 80%, 85%, 90%, 95%, 96%, 97%, 98%, or 99% identical to these polypeptides and polypeptides encoded by the polynucleotide which hybridizes, under stringent conditions, to the polynucleotide encoding these polypeptides) are encompassed by the invention. Antibodies that bind polypeptides of the invention are also encompassed by the invention. Polynucleotides encoding these polypeptides are also encompassed by the invention.

[0309] This gene is expressed primarily in the brain, and to a lesser extent, in the kidney and thymus

[0310] Polynucleotides and polypeptides of the invention are useful as reagents for differential identification of the tissue(s) or cell type(s) present in a biological sample and for diagnosis of diseases and conditions which include, but are not limited to, brain, kidney, endocrine, hematopoietic, and immune disorders. Similarly, polypeptides and antibodies directed to these polypeptides are useful in providing immunological probes for differential identification of the tissue(s) or cell type(s). For a number of disorders of the above tissues or cells, particularly of the brain, kidney, and immune disorders, expression of this gene at significantly higher or lower levels may be routinely detected in certain tissues or cell types (e.g., neural, urogenital, renal, immune, hematopoietic, and cancerous and wounded tissues) or bodily fluids (e.g., lymph, serum, plasma, urine, synovial fluid and spinal fluid) or another tissue or cell sample taken from an individual having such a disorder, relative to the standard gene expression level, i.e., the expression level in healthy tissue or bodily fluid from an individual not having the disorder.

[0311] The tissue distribution in brain and thymus, combined with the homology to an alpha-2 type I collagen protein indicates that the protein product of this gene is useful for the diagnosis and treatment of tissue repair, and brain, kidney, immune disorders. Moreover, this protein may also be important in the diagnosis or treatment of various autoimmune disorders such as rheumatoid arthritis, lupus, scleroderma, and dermatomyositis as well as dwarfism, spinal deformation, and specific joint abnormalities as well as chondrodysplasias i.e. spondyloepiphyseal dysplasia congenita, familial osteoarthritis, Atelosteogenesis type II, metaphyseal chondrodysplasia type Schmid. Protein, as well as, antibodies directed against the protein may show utility as a tumor marker and/or immunotherapy targets for the above listed tissues.

[0312] Many polynucleotide sequences, such as EST sequences, are publicly available and accessible through sequence databases. Some of these sequences are related to SEQ ID NO:49 and may have been publicly available prior to conception of the present invention. Preferably, such related polynucleotides are specifically excluded from the scope of the present invention. To list every related sequence is cumbersome. Accordingly, preferably excluded from the present invention are one or more polynucleotides comprising a nucleotide sequence described by the general formula of a-b, where a is any integer between 1 to 1728 of SEQ ID NO:49, b is an integer of 15 to 1742, where both a and b correspond to the positions of nucleotide residues shown in SEQ ID NO:49, and where b is greater than or equal to a+14.

[0313] Features of Protein Encoded by Gene No: 40

[0314] The translation product of this gene shares sequence homology with mini-collagen which is thought to be important in tissue repair and tumor metastasis, and potentially in cellular migration, attachment, and/or chemotaxis. (See Genbank Accession No. gn1|PID|d1006976.)

[0315] In specific embodiments, polypeptides of the invention comprise, or alternatively consists of, the following amino acid sequence: PGFRGPSGSLGCSFFPRSLGRVLPPGCQRPGAHADS SPPPTP (SEQ ID NO:594). Moreover, fragments and variants of this polypeptide (such as, for example, fragments as described herein, polypeptides at least 80%, 85%, 90%, 95%, 96%, 97%, 98%, or 99% identical to these polypeptides and polypeptides encoded by the polynucleotide which hybridize, under stringent conditions, to the polynucleotide encoding this polypeptide are encompassed by the invention. Antibodies that bind polypeptides of the invention are also encompassed by the invention. Polynucleotides encoding this polypeptide are also encompassed by the invention.

[0316] The gene encoding the disclosed cDNA is believed to reside on chromosome 16. Accordingly, polynucleotides related to this invention are useful as a marker in linkage analysis for chromosome 16.

[0317] This gene is expressed in ovarian cancer, and to a lesser extent, in dendritic cells and smooth muscle.

[0318] Polynucleotides and polypeptides of the invention are useful as reagents for differential identification of the tissue(s) or cell type(s) present in a biological sample and for diagnosis of diseases and conditions which include, but are not limited to, tumor metastasis, tissue repair, integumentary, reproductive, and/or immune disorders, particularly cancers. Similarly, polypeptides and antibodies directed to these polypeptides are useful in providing immunological probes for differential identification of the tissue(s) or cell type(s). For a number of disorders of the above tissues or cells, particularly of the tumor metastasis and tissue repair, expression of this gene at significantly higher or lower levels may be routinely detected in certain tissues or cell types (e.g., integumentary, immune, hematopoietic, reproductive, ovarian, and cancerous and wounded tissues) or bodily fluids (e.g., lymph, serum, plasma, urine, synovial fluid and spinal fluid) or another tissue or cell sample taken from an individual having such a disorder, relative to the standard gene expression level, i.e., the expression level in healthy tissue or bodily fluid from an individual not having the disorder.

[0319] Predicted epitopes include those comprising a sequence shown in SEQ ID NO:288 as residues: Asn-2 to His-11.

[0320] The tissue distribution in dendritic cells, combined with the homology to the mini-collagen gene indicates that the protein product of this gene is useful for diagnosis and treatment of tumor metastasis and tissue repair. Alternatively, this protein may also be important in the diagnosis or treatment of various autoimmune disorders such as rheumatoid arthritis, lupus, scleroderma, and dermatomyositis as well as dwarfism, spinal deformation, and specific joint abnormalities as well as chondrodysplasias i.e. spondyloepiphyseal dysplasia congenita, familial osteoarthritis, Atelosteogenesis type II, metaphyseal chondrodysplasia type Schmid. Protein, as well as, antibodies directed against the protein may show utility as a tumor marker and/or immunotherapy targets for the above listed[tissues.

[0321] Many polynucleotide sequences, such as EST sequences, are publicly available and accessible through sequence databases. Some of these sequences are related to SEQ ID NO:50 and may have been publicly available prior to conception of the present invention. Preferably, such related polynucleotides are specifically excluded from the scope of the present invention. To list every related sequence is cumbersome. Accordingly, preferably excluded from the present invention are one or more polynucleotides comprising a nucleotide sequence described by the general formula of a-b, where a is any integer between 1 to 1473 of SEQ ID NO:50, b is an integer of 15 to 1487, where both a and b correspond to the positions of nucleotide residues shown in SEQ ID NO:50, and where b is greater than or equal to a+14.

[0322] Features of Protein Encoded by Gene No: 41

[0323] This gene shares sequence homology with the HIV TAT protein. (See Genbank Accession No. 328416.)

[0324] In specific embodiments, polypeptides of the invention comprise, or alternatively consists of, an amino acid sequence selected from the group: EDLKKPDPASLRAASCGEGKKRKACKNCTCGLAEELEKEKSREQMSSQPKSA CGNCYLGDAFRCASCPYLGMPAFKPGEKVLLS (SEQ ID NO:595); EDLKKPDPASLRAASCGEGKKRKACKNCTCGLAEELEKEKSREQMSSQPKSA CGNCYLGDAFRCASCPYLGMPAFKPGEKVLLSDSNLHD (SEQ ID NO:596); CGNCYLGDAFRCASCPYLGMPAFKPGEKVLLSDS (SEQ ID NO:597); SCGEGKKRKACKNCTCGLAEELEKE (SEQ ID NO:598), SQPKSACGNCYLGDAFRCASC (SEQ ID NO:599); CCCVSKDQGIMGPGFR (SEQ ID NO:601), HSVTELQTPALSLISAMLPPSCLSELLVYSILCDTSQVAHNLLRAPEDSLTGCC DDIQCPSAPFHPQPHLTVALHLCPVVIYVNLQVLNLLHILTYLEILHVL (SEQ ID NO:602), LLVYSILCDTSQVAHNLLRAPEDS (SEQ ID NO:603), LTVALHLCPVVIYVNLQVLNLLHILT (SEQ ID NO:604), and/or REAGQNSERQYVSLSRDP (SEQ ID NO:600). Moreover, fragments and variants of these polypeptides (such as, for example, fragments as described herein, polypeptides at least 80%, 85%, 90%, 95%, 96%, 97%, 98%, or 99% identical to these polypeptides and polypeptides encoded by the polynucleotide which hybridizes, under stringent conditions, to the polynucleotide encoding these polypeptides) are encompassed by the invention. Antibodies that bind polypeptides of the invention are also encompassed by the invention. Polynucleotides encoding these polypeptides are also encompassed by the invention.

[0325] This gene is expressed primarily in the infant brain, and to a lesser extent, in the breast and testes.

[0326] Polynucleotides and polypeptides of the invention are useful as reagents for differential identification of the tissue(s) or cell type(s) present in a biological sample and for diagnosis of diseases and conditions which include, but are not limited to, neural, developmental, reproductive, brain, testes and breast disorders. Similarly, polypeptides and antibodies directed to these polypeptides are useful in providing immunological probes for differential identification of the tissue(s) or cell type(s). For a number of disorders of the above tissues or cells, particularly of the brain, testes and breast disorders, expression of this gene at significantly higher or lower levels may be routinely detected in certain tissues or cell types (e.g., neural, developmental, reproductive, testicular, breast, and cancerous and wounded tissues) or bodily fluids (e.g., seminal fluid, amniotic fluid, lymph, serum, plasma, urine, synovial fluid and spinal fluid) or another tissue or cell sample taken from an individual having such a disorder, relative to the standard gene expression level, i.e., the expression level in healthy tissue or bodily fluid from an individual not having the disorder.

[0327] Predicted epitopes include those comprising a sequence shown in SEQ ID NO:289 as residues: Pro-7 to Val-15.

[0328] The tissue distribution in infant brain tissue indicates that the protein product of this gene is useful for diagnosis and treatment of neural and other related disorders. Similarly the protein product of this gene is useful for the detection/treatment of neurodegenerative disease states, behavioral disorders, or inflammatory conditions such as Alzheimer's Disease, Parkinson's Disease, Huntington's Disease, Tourette's Syndrome, meningitis, encephalitis, demyelinating diseases, peripheral neuropathies, neoplasia, trauma, congenital malformations, spinal cord injuries, ischemia and infarction, aneurysms, hemorrhages, schizophrenia, mania, dementia, paranoia, obsessive compulsive disorder, panic disorder, learning disabilities, ALS, psychoses, autism, and altered behaviors, including disorders in feeding, sleep patterns, balance, and perception. In addition, elevated expression of this gene product in regions of the brain indicates that it plays a role in normal neural function. Potentially, this gene product is involved in synapse formation, neurotransmission, learning, cognition, homeostasis, or neuronal differentiation or survival. Moreover, the gene or gene product may also play a role in the treatment and/or detection of developmental disorders associated with the developing embryo, sexually-linked disorders, or disorders of the cardiovascular or reproductive system. Protein, as well as, antibodies directed against the protein may show utility as a tumor marker and/or immunotherapy targets for the above listed tissues.

[0329] Many polynucleotide sequences, such as EST sequences, are publicly available and accessible through sequence databases. Some of these sequences are related to SEQ ID NO:51 and may have been publicly available prior to conception of the present invention. Preferably, such related polynucleotides are specifically excluded from the scope of the present invention. To list every related sequence is cumbersome. Accordingly, preferably excluded from the present invention are one or more polynucleotides comprising a nucleotide sequence described by the general formula of a-b, where a is any integer between 1 to 1314 of SEQ ID NO:51, b is an integer of 15 to 1328, where both a and b correspond to the positions of nucleotide residues shown in SEQ ID NO:51, and where b is greater than or equal to a+14.

[0330] Features of Protein Encoded by Gene No: 42

[0331] In specific embodiments, polypeptides of the invention comprise, or alternatively consists of, the following amino acid sequence: FFNALYVFRKPQAIFDSEKENKRKNPTKYNNPLRYIYFKVKLIFQFIPLANYKI K (SEQ ID NO:605). Moreover, fragments and variants of this polypeptide (such as, for example, fragments as described herein, polypeptides at least 80%, 85%, 90%, 95%, 96%, 97%, 98%, or 99% identical to these polypeptides and polypeptides encoded by the polynucleotide which hybridize, under stringent conditions, to the polynucleotide encoding this polypeptide are encompassed by the invention. Antibodies that bind polypeptides of the invention are also encompassed by the invention. Polynucleotides encoding this polypeptide are also encompassed by the invention.

[0332] The gene encoding the disclosed cDNA is believed to reside on chromosome 3. Accordingly, polynucleotides related to this invention are useful as a marker in linkage analysis for chromosome 3.

[0333] This gene is expressed primarily in the infant brain, human cerebellum, and to a lesser extent, in medulloblastoma.

[0334] Polynucleotides and polypeptides of the invention are useful as reagents for differential identification of the tissue(s) or cell type(s) present in a biological sample and for diagnosis of diseases and conditions which include, but are not limited to, brain related disorders, such as neurodegenerative conditions, medulloblastoma, and other cancers or proliferative conditions. Similarly, polypeptides and antibodies directed to these polypeptides are useful in providing immunological probes for differential identification of the tissue(s) or cell type(s). For a number of disorders of the above tissues or cells, particularly of the brain related disorders and brain cancers, including medulloblastoma, expression of this gene at significantly higher or lower levels may be routinely detected in certain tissues or cell types (e.g., neural, developmental, and cancerous and wounded tissues) or bodily fluids (e.g., lymph, amniotic fluid, serum, plasma, urine, synovial fluid and spinal fluid) or another tissue or cell sample taken from an individual having such a disorder, relative to the standard gene expression level, i.e., the expression level in healthy tissue or bodily fluid from an individual not having the disorder.

[0335] Predicted epitopes include those comprising a sequence shown in SEQ ID NO:290 as residues: Thr-41 to Glu-47.

[0336] The tissue distribution in infant brain and medulloblastoma indicates that the protein product of this gene is useful for diagnosis and treatment of human brain related disorders, brain cancers, and medulloblastoma. Similarly, the protein product of this gene is useful for the detection/treatment of neuroclegenerative disease states, behavioral disorders, or inflammatory conditions such as Alzheimer's Disease, Parkinson's Disease, Huntington's Disease, Tourette's Syndrome, meningitis, encephalitis, demyelinating diseases, peripheral neuropathies, neoplasia, trauma, congenital malformations, spinal cord injuries, ischemia and infarction, aneurysms, hemorrhages, schizophrenia, mania, dementia, paranoia, obsessive compulsive disorder, panic disorder, learning disabilities, ALS, psychoses, autism, and altered behaviors, including disorders in feeding, sleep patterns, balance, and perception. In addition, elevated expression of this gene product in regions of the brain indicates that it plays a role in normal neural function. Potentially, this gene product is involved in synapse formation, neurotransmission, learning, cognition, homeostasis, or neuronal differentiation or survival. Moreover, the gene or gene product may also play a role in the treatment and/or detection of developmental disorders associated with the developing embryo, sexually-linked disorders, or disorders of the cardiovascular system. Protein, as well as, antibodies directed against the protein may show utility as a tumor marker and/or immunotherapy targets for the above listed tissues.

[0337] Many polynucleotide sequences, such as EST sequences, are publicly available and accessible through sequence databases. Some of these sequences are related to SEQ ID NO:52 and may have been publicly available prior to conception of the present invention. Preferably, such related polynucleotides are specifically excluded from the scope of the present invention. To list every related sequence is cumbersome. Accordingly, preferably excluded from the present invention are one or more polynucleotides comprising a nucleotide sequence described by the general formula of a-b, where a is any integer between 1 to 1842 of SEQ ID NO:52, b is an integer of 15 to 1856, where both a and b correspond to the positions of nucleotide residues shown in SEQ ID NO:52, and where b is greater than or equal to a+14.

[0338] Features of Protein Encoded by Gene No: 43

[0339] The translation product of this gene shares sequence homology with a phosphotyrosine-independent ligand for the lck SH2 domain which is thought to be important in signal transduction related to phosphotyrosine-independent ligand for the lck SH2 domain, which may implicate this protein as playing an essential role in regulating key cellular processes such as cellular division, and potentially in male fertility. (See Genbank Accession No. gi|1184951.)

[0340] In specific embodiments, polypeptides of the invention comprise, or alternatively consists of, an amino acid sequence selected from the group: ESSGQARTLADPGPGWPRQQGMCFGSLTGLSTTPHGFLTVSAEADPRLIESLS QMLSMGFSDEGGWLTRLLQTKNYDIGAALDTIQYSKH (SEQ ID NO:606), YSMVYIYHIFFIHSLLDGQLGWFHIFAIVSCAAPDIIFNSFAFSTYISKSCSFYLQ NVSCIHSSLSIFNLFQCPIISCMEECNNWLTGLFLHFKIKRCDR (SEQ ID NO:607), LSPSPRCCPWASLMKAAGSPGSCRPRTMTSERLWTPSSIQSIPRRCDHFCPPLL RAPLLSHSCVKLA (SEQ ID NO:608), GWPRQQGMCFGSLTGLSTTPHGFLTVSAEADPRL (SEQ ID NO:609), LGWFHIFAIVSCAAPDIIFNSFAFSTYISKSCS (SEQ ID NO:610), SLSIFNLFQCPIISCMEECNNWLTG (SEQ ID NO:611), and/or LMKAAGSPGSCRPRTMTSERLWTPSSIQSI (SEQ ID NO:612). Moreover, fragments and variants of these polypeptides (such as, for example, fragments as described herein, polypeptides at least 80%, 85%, 90%, 95%, 96%, 97%, 98%, or 99% identical to these polypeptides and polypeptides encoded by the polynucleotide which hybridizes, under stringent conditions, to the polynucleotide encoding these polypeptides) are encompassed by the invention. Antibodies that bind polypeptides of the invention are also encompassed by the invention. Polynucleotides encoding these polypeptides are also encompassed by the invention.

[0341] It is likely that this gene is a new member of a family of phosphotyrosine-independent ligands for the lck SH2 domains.

[0342] This gene is expressed primarily in the placenta, and to a lesser extent, in endothelial cells and neutrophils.

[0343] Polynucleotides and polypeptides of the invention are useful as reagents for differential identification of the tissue(s) or cell type(s) present in a biological sample and for diagnosis of diseases and conditions which include, but are not limited to, reproductive, cardiovascular, immune, and infectious diseases. Similarly, polypeptides and antibodies directed to these polypeptides are useful in providing immunological probes for differential identification of the tissue(s) or cell type(s). For a number of disorders of the above tissues or cells, particularly of the cardiovascular, reproductive, and immune system, and infectious diseases, expression of this gene at significantly higher or lower levels may be routinely detected in certain tissues or cell types (e.g., reproductive, cardiovascular, immune, hematopoietic, and cancerous and wounded tissues) or bodily fluids (e.g., lymph, amniotic fluid, seminal fluid, serum, plasma, urine, synovial fluid and spinal fluid) or another tissue or cell sample taken from an individual having such a disorder, relative to the standard gene expression level, i.e., the expression level in healthy tissue or bodily fluid from an individual not having the disorder.

[0344] Predicted epitopes include those comprising a sequence shown in SEQ ID NO:291 as residues: Ile-93 to Arg-98.

[0345] The tissue distribution in placenta and endothelial Issues, combined with the homology to a phosphotyrosine-independent ligand for the lck SH2 domain indicates that the protein product of this gene is useful for diagnosis and treatment of cardiovascular, reproductive, and immune system diseases, as well as infectious diseases. Moreover, the polypeptide of this gene may be able to modulate T or B cell development and/or T or B cell activation (e.g. by modulation of Lck activity). It may also be capable of modulating degradation of cellular proteins (e.g. cell cycle regulatory proteins stimulating expression of cell cycle dependent kinase inhibitors and arresting cell cycle progression at specific boundaries to thereby modulate cell proliferation). p62 acts to boost B cell response and may be used to treat disorders where this is beneficial, e.g. infections by pathogenic microorganisms, e.g. bacteria, viruses and protozoans. p62 can be used to expand T cell populations for treating infectious diseases or cancer, e.g. the resulting cells may be transduced to render them resistant to HIV infection. Inhibitors of p62 can be used to reduce B or T cell responses and may be used to treat a variety of autoimmune diseases, e.g. diabetes mellitus, arthritis, multiple sclerosis allergic reactions, Crohn's diseases etc. Protein, as well as, antibodies directed against the protein may show utility as a tumor marker and/or immunotherapy targets for the above listed tissues.

[0346] Many polynucleotide sequences, such as EST sequences, are publicly available and accessible through sequence databases. Some of these sequences are related to SEQ ID NO:53 and may have been publicly available prior to conception of the present invention. Preferably, such related polynucleotides are specifically excluded from the scope of the present invention. To list every related sequence is cumbersome. Accordingly, preferably excluded from the present invention are one or more polynucleotides comprising a nucleotide sequence described by the general formula of a-b, where a is any integer between 1 to 1544 of SEQ ID NO:53, b is an integer of 15 to 1558, where both a and b correspond to the positions of nucleotide residues shown in SEQ ID NO:53, and where b is greater than or equal to a+14.

[0347] Features of Protein Encoded by Gene No: 44

[0348] In specific embodiments, polypeptides of the invention comprise, or alternatively consists of, the following amino acid sequences:

(SEQ ID NO:613)

SSSSPRRPRELLGSLKTPLVRPHSAPLDLPGSFCXHTADPMGALHTRFWG
RQTWIHRKLRLHGTSRLASKXGIQFLRNPSKTHTPRDAAFRDPGQTPDPQ
SLQAPSPSKCSAPNRATSVWSLKPRLLYKHRPSSDKTPPPGRQAPLLFFS
AG, and/or

(SEQ ID NO:614)

FLRNPSKTHTPRDAAFRDPGQTPDPQSLQA.

[0349] Moreover, fragments and variants of these polypeptides (such as, for example, fragments as described herein, polypeptides at least 80%, 85%, 90%, 95%, 96%, 97%, 98%, or 99% identical to these polypeptides and polypeptides encoded by the polynucleotide which hybridizes, under stringent conditions, to the polynucleotide encoding these polypeptides) are encompassed by the invention. Antibodies that bind polypeptides of the invention are also encompassed by the invention. Polynucleotides encoding these polypeptides are also encompassed by the invention.

[0350] This gene is expressed primarily in the fetal brain, cerebellum, and to a lesser extent, in the placenta.

[0351] Polynucleotides and polypeptides of the invention are useful as reagents for differential identification of the tissue(s) or cell type(s) present in a biological sample and for diagnosis of diseases and conditions which include, but are not limited to, neural, developmental, or reproductive disorders, particularly cancers. Similarly, polypeptides and antibodies directed to these polypeptides are useful in providing immunological probes for differential identification of the tissue(s) or cell type(s). For a number of disorders of the above tissues or cells, particularly of the neuronal cell related disorders, expression of this gene at significantly higher or lower levels may be routinely detected in certain tissues or cell types (e.g., neural, reproductive, vascular, and cancerous and wounded tissues) or bodily fluids (e.g., lymph, amniotic fluid, serum, plasma, urine, synovial fluid and spinal fluid) or another tissue or cell sample taken from an individual having such a disorder, relative to the standard gene expression level, i.e., the expression level in healthy tissue or bodily fluid from an individual not having the disorder.

[0352] Predicted epitopes include those comprising a sequence shown in SEQ ID NO:292 as residues: Thr-20 to Gly-28.

[0353] The tissue distribution in fetal brain, combined with the homology to proline-rich protein genes indicates that the protein product of this gene is useful for diagnosis and treatment of neuronal cell related disorders. Similarly, the protein product of this gene is useful for the detection/treatment of neurodegenerative disease states, behavioral disorders, or inflammatory conditions such as Alzheimer's Disease, Parkinson's Disease, Huntington's Disease, Tourette's Syndrome, meningitis, encephalitis, demyelinating diseases, peripheral neuropathies, neoplasia, trauma, congenital malformations, spinal cord injuries, ischemia and infarction, aneurysms, hemorrhages, schizophrenia, mania, dementia, paranoia, obsessive compulsive disorder, panic disorder, learning disabilities, ALS, psychoses, autism, and altered behaviors, including disorders in feeding, sleep patterns, balance, and perception. In addition, elevated expression of this gene product in regions of the brain indicates that it plays a role in normal neural function. Potentially, this gene product is involved in synapse formation, neurotransmission, learning, cognition, homeostasis, or neuronal differentiation or survival. Moreover, the gene or gene product may also play a role in the treatment and/or detection of developmental disorders associated with the developing embryo, sexually-linked disorders, or disorders of the cardiovascular system. Moreover, expression within fetal tissue and other cellular sources marked by proliferating cells indicates that this protein may play a role in the regulation of cellular division, and may show utility in the diagnosis and treatment of cancer and other proliferative disorders. Similarly, developmental tissues rely on decisions involving cell differentiation and/or apoptosis in pattern formation. Thus this protein may also be involved in apoptosis or tissue differentiation and could again be useful in cancer therapy. Protein, as well as, antibodies directed against the protein may show utility as a tumor marker and/or immunotherapy targets for the above listed tissues.

[0354] Many polynucleotide sequences, such as EST sequences, are publicly available and accessible through sequence databases. Some of these sequences are related to SEQ ID NO:54 and may have been publicly available prior to conception of the present invention. Preferably, such related polynucleotides are specifically excluded from the scope of the present invention. To list every related sequence is cumbersome. Accordingly, preferably excluded from the present invention are one or more polynucleotides comprising a nucleotide sequence described by the general formula of a-b, where a is any integer between 1 to 934 of SEQ ID NO:54, b is an integer of 15 to 948, where both a and b correspond to the positions of nucleotide residues shown in SEQ ID NO:54, and where b is greater than or equal to a+14.

[0355] Features of Protein Encoded by Gene No: 45

[0356] The translation product of this gene shares sequence homology with precerebellin of human, which is thought to be important in synaptic physiology. (See Genbank Accession No. gi|180251.) The cerebellum contains a hexadecapeptide, termed cerebellin, that is conserved in sequence from human to chicken. Three independent, overlapping cDNA genes have been isolated from a human cerebellum cDNA library that encode the cerebellin sequence. The longest gene codes for a protein of 193 amino acids that we term precerebellin. This protein has a significant similarity (31.3% identity, 52.2% similarity) to the globular (non-collagen-like) region of the B chain of human complement component C1q. The region of relatedness extends over approximately 145 amino acids located in the carboxyl terminus of both proteins. Unlike C1q B chain, no collagen-like motifs are present in the amino-terminal regions of precerebellin. The amino terminus of precerebellin contains three possible N-linked glycosylation sites. Although hydrophobic amino acids are clustered at the amino terminus, they do not conform to the classical signal-peptide motif, and no other obvious membrane-spanning domains are predicted from the cDNA sequence. The cDNA predicts that the cerebellin peptide is flanked by Val-Arg and Glu-Pro residues. Therefore, cerebellin is not liberated from precerebellin by the classical dibasic amino acid proteolytic-cleavage mechanism seen in many neuropeptide precursors. In Northern (RNA) blots, precerebellin transcripts, with four distinct sizes (1.8, 2.3, 2.7, and 3.0 kilobases), are abundant in cerebellum. These transcripts are present at either very low or undetectable levels in other brain areas and extraneural strictures. A similar pattern of cerebellin precursor transcripts are seen in rat, mouse, and human cerebellum. Furthermore, a partial genomic fragment from mouse shows the same bands in Northern blots as the human cDNA gene. During rat development, precerebellin transcripts mirror the level of cerebellin peptide. Low levels of precerebellin mRNA are seen at birth. Levels increase modestly from postpartum day 1 to 8, then increase more dramatically between day 5 and 15, and eventually reach peak values between day 21 and 56. It has been observed that cerebellin-like immunoreactivity is associated with Purkinje cell postsynaptic structures. Thus, it is likely that this gene also have synaptic activity. Northern analysis showed a brain-specific 2.4 kb message. This is consistent with the current insert size we have, suggesting our gene is full-length and is brain-specific.

[0357] In specific embodiments, polypeptides of the invention comprise, or alternatively consists of, an amino acid sequence selected from the group:

(SEQ ID NO:615)

QEGSEPVLLEGECLVVCEPGRAAAGGPGGAALGEAPPGRVAFXAVRSHHH
EPAGETGNGTSGAIYFDQVLVNEGGGFDRASGSFVAPVRGVYSFRFHVVK
VYNRQTVQVSLMLNTWPVISAFANDPDVTREAATSSVLLPLDPGDRVSLR
LRRGXSTGW,

(SEQ ID NO:616)

GETGNGTSGAIYFDQVLVNEGGGFDRASGSFVAPV

(SEQ ID NO:617)

NDPDVTREAATSSVLLPLDPGDRVS,

(SEQ ID NO:618)

FHVVKVYNRQT,

(SEQ ID NO:619)

IYFDQVLVN,

(SEQ ID NO:620)

ESRERSGNRRGAEDRGTCGLQSPSA,

(SEQ ID NO:621)

EMPQFYFFLKLGCLAQVPMQRGGIGARGSXXPAXAVXGAREGRRKLSGAG
FLCLKDLGPSEREDEEARET,

(SEQ ID NO:622)

MPQFYFFLKLGCLAQVPMQRGGIGARG,

(SEQ ID NO:623)

QATCSASGSPGQFGGCTPSPHGTGSCRHPGQGLRRSQRPGQSHRPRSPGP
GRSRWPHWCHCRFPLLAHGGGFGPQQMPLAQGVPLPGLLPRAPLQQLGQA
HRPPGTPPPAGRALTPPGPTRPPGPEAPEPRAARDCVGDLVASVAWLPTW
LRGSATHKCPGLLPLFCFRSSPWILTAGTLIVCPL,

(SEQ ID NO:624)

GCTPSPHGTGSCRHPGQGLRRSQRP,

(SEQ ID NO:625)

SRWPHWCHCRFPLLAHGGGFGPQQMP,

(SEQ ID NO:626)

DCVGDLVASVAWLPTWLRGSATHKCPGL,

(SEQ ID NO:627)

DDRPRVQHQAHLDSLAVVHLHHMEPEAVDTPDRGYEGARGPVKATALVHQ
DLVEVDGPTGAIAGFPCWLMVVASDRXKCHSPRGCLSQGCSPGPPCSSSA
RLTDHQALPLQQDGL,

(SEQ ID NO:628)

YEGARGPVKATALVHQDLVEVDGPTGAIAGF,

(SEQ ID NO:629)

MAPLVPLPVSPAGSWWWLRTAXNATRPGGASPRAAPPGPPAAARPGSQTT
RHSPSSRTGSDPSWAHPAPRARSTRTKGSPGLCRGPGSQCGLAPNMAEGL
CNPQVPRSSAPLLFPLLSLDSHRRHPDSLPSLGSLNPLSIPVSQLCPASH
SYSCCHCSS,

(SEQ ID NO:630)

SSRTGSDPSWAHPAPRARSTRTKGSPGLC,
and/or

(SEQ ID NO:631)

RRHPDSLPSLGSLNPLSIPVSQLCPAS.

[0358] Moreover, fragments and variants of these polypeptides (such as, for example, fragments as described herein, polypeptides at least 80%, 85%, 90%, 95%, 96%, 97%, 98%, or 99% identical to these polypeptides and polypeptides encoded by the polynucleotide which hybridizes, under stringent conditions, to the polynucleotide encoding these polypeptides) are encompassed by the invention. Antibodies that bind polypeptides of the invention are also encompassed by the invention. Polynucleotides encoding these polypeptides are also encompassed by the invention.

[0359] This gene is expressed primarily in cerebellum and infant brain. By Northern analysis, a single transcript of 2.4 kb was observed in brain tissues.

[0360] Polynucleotides and polypeptides of the invention are useful as reagents for differential identification of the tissue(s) or cell type(s) present in a biological sample and for diagnosis of diseases and conditions which include, but are not limited to, neural and developmental disorders, particularly neuronal cell signal transduction, synaptic physiology, or proliferative conditions such as cancer. Similarly, polypeptides and antibodies directed to these polypeptides are useful in providing immunological probes for differential identification of the tissue(s) or cell type(s). For a number of disorders of the above tissues or cells, particularly of the neuronal cell signal transduction and synaptic physiology expression of this gene at significantly higher or lower levels may be routinely detected in certain tissues or cell types (e.g., neural, developmental, and cancerous and wounded tissues) or bodily fluids (e.g., lymph, amniotic fluid, serum, plasma, urine, synovial fluid and spinal fluid) or another tissue or cell sample taken from an individual having such a disorder, relative to the standard gene expression level, i.e., the expression level in healthy tissue or bodily fluid from an individual not having the disorder.

[0361] The tissue distribution in cerebellum and infant brain, combined with the homology to the conserved precerebellin gene or gene family indicates that the protein product of this gene is useful for diagnosis and treatment of neuronal cell related disorders. Furthermore, the protein product of this gene is useful for the detection/treatment of neurodegenerative disease states, behavioral disorders, or inflammatory conditions such as Alzheimer's Disease, Parkinson's Disease, Huntington's Disease, Tourette's Syndrome, meningitis, encephalitis, demyelinating diseases, peripheral neuropathies, neoplasia, trauma, congenital malformations, spinal cord injuries, ischemia and infarction, aneurysms, hemorrhages, schizophrenia, mania, dementia, paranoia, obsessive compulsive disorder, panic disorder, learning disabilities, ALS, psychoses, autism, and altered behaviors, including disorders in feeding, sleep patterns, balance, and perception. In addition, elevated expression of this gene product in regions of the brain indicates that it plays a role in normal neural function. Potentially, this gene product is involved in synapse formation, neurotransmission, learning, cognition, homeostasis, or neuronal differentiation or survival. Moreover, the gene or gene product may also play a role in the treatment and/or detection of developmental disorders associated with the developing embryo, sexually-linked disorders, or disorders of the cardiovascular system. Protein, as well as, antibodies directed against the protein may show utility as a tumor marker and/or immunotherapy targets for the above listed tissues.

[0362] Many polynucleotide sequences, such as EST sequences, are publicly available and accessible through sequence databases. Some of these sequences are related to SEQ ID NO:55 and may have been publicly available prior to conception of the present invention. Preferably, such related polynucleotides are specifically excluded from the scope of the present invention. To list every related sequence is cumbersome. Accordingly, preferably excluded from the present invention are one or more polynucleotides comprising a nucleotide sequence described by the general formula of a-b, where a is any integer between 1 to 976 of SEQ ID NO:55, b is an integer of 15 to 990, where both a and b correspond to the positions of nucleotide residues shown in SEQ ID NO:55, and where b is greater than or equal to a+14.

[0363] Features of Protein Encoded by Gene No: 46

[0364] In specific embodiments, polypeptides of the invention comprise, or alternatively consist of, the following amino acid sequences: STHASGPPAPERLCLPERGTAPWGRRANDAA (SEQ ID NO:632), VRRWWLRTMGAAAHCTPEQRRPRRPATILGMDTQILHTRLSLCSLSWVSL ASSFXXLAXRRKAIVVQQKQSKISKKKKVEKXXLNDSVNENSDTVGQIVHYI MKNEANADVLKAMVADNSLYDPESPVTPSTPGSPPVSPGLCHQGGRQGSTS VAIICIRWAVXSRGMCVIGVGTSGGTL (SEQ ID NO:633), and/or IMKNEANADVLKAMVADNSLYDPESPVTP (SEQ ID NO:634). Moreover, fragments and variants of these polypeptides (such as, for example, fragments as described herein, polypeptides at least 80%, 85%, 90%, 95%, 96%, 97%, 98%, or 99% identical to these polypeptides and polypeptides encoded by the polynucleotide which hybridizes, under stringent conditions, to the polynucleotide encoding these polypeptides) are encompassed by the invention. Antibodies that bind polypeptides of the invention are also encompassed by the invention. Polynucleotides encoding these polypeptides are also encompassed by the invention.

[0365] This gene is expressed in fetal liver and spleen, and to a lesser extent in bone marrow, umbilical vein, and T cells.

[0366] Polynucleotides and polypeptides of the invention are useful as reagents for differential identification of the tissue(s) or cell type(s) present in a biological sample and for diagnosis of diseases and conditions which include, but are not limited to, disorders of the immune system, particularly hematopoiesis. Similarly, polypeptides and antibodies directed to these polypeptides are useful in providing immunological probes for differential identification of the tissue(s) or cell type(s). For a number of disorders of the above tissues or cells, particularly of the hematopoiesis and immune disorders, expression of this gene at significantly higher or lower levels may be routinely detected in certain tissues or cell types (e.g., immune, hematopoietic, developmental, and cancerous and wounded tissues) or bodily fluids (e.g., lymph, amniotic fluid, serum, plasma, urine, synovial fluid and spinal fluid) or another tissue or cell sample taken from an individual having such a disorder, relative to the standard gene expression level, i.e., the expression level in healthy tissue or bodily fluid from an individual not having the disorder.

[0367] Predicted epitopes include those comprising a sequence shown in SEQ ID NO:294 as residues: Asp-30 to Glu-57.

[0368] The tissue distribution in fetal liver/spleen and bone marrow indicates that the protein product of this gene is useful for diagnosis and treatment of hematopoietic and immune disorders. Moreover, the protein product of this gene is useful for the treatment and diagnosis of hematopoetic related disorders such as anemia, pancytopenia, leukopenia, thrombocytopenia or leukemia since stromal cells are important in the production of cells of hematopoietic lineages. The uses include bone marrow cell ex vivo culture, bone marrow transplantation, bone marrow reconstitution, radiotherapy or chemotherapy of neoplasia. The gene product may also be involved in lymphopoiesis, therefore, it can be used in immune disorders such as infection, inflammation, allergy, immunodeficiency etc. In addition, this gene product may have commercial utility in the expansion of stem cells and committed progenitors of various blood lineages, and in the differentiation and/or proliferation of various cell types. Protein, as well as, antibodies directed against the protein may show utility as a tumor marker and/or immunotherapy targets for the above listed tissues.

[0369] Many polynucleotide sequences, such as EST sequences, are publicly available and accessible through sequence databases. Some of these sequences are related to SEQ ID NO:56 and may have been publicly available prior to conception of the present invention. Preferably, such related polynucleotides are specifically excluded from the scope of the present invention. To list every related sequence is cumbersome. Accordingly, preferably excluded from the present invention are one or more polynucleotides comprising a nucleotide sequence described by the general formula of a-b, where a is any integer between 1 to 1589 of SEQ ID NO:56, b is an integer of 15 to 1603, where both a and b correspond to the positions of nucleotide residues shown in SEQ ID NO:56, and where b is greater than or equal to a+14.

[0370] Features of Protein Encoded by Gene No: 47

[0371] The translation product of this gene shares sequence homology with a 12 kD nucleic acid binding protein of Feline calcivirus which is thought to be important in viral replication and may implicate this protein as playing an integral role in the development of host-viral inhibitors and/or novel vaccines. (See Genbank Accession No. 59264).

[0372] In specific embodiments, polypeptides of the invention comprise, or alternatively consist of, the following amino acid sequences: HCHLWASGSCLACFFPGGLTRDAAQQHVTKSYSPPYLSQTSHSCLVFQPVLW PEYTFWNLFEAILQFQMNHSVLQQXGPRHVCRGAEEAAAGEGPGYSDRAAA ARGAPSQWGRPAPKDTLAQTLGQTGRASPRLPAGLGTQAS (SEQ ID NO:635), PAPKDTLAQTLGQTGRASPRLPAGLGTQ (SEQ ID NO:636), TIACFSXKARDMYAEERKRQQLERDQATVTEQLLREGLQASGDAQLRRTRL HKLSARREERVQGFLQALELKRADWLARLGTASA (SEQ ID NO:637), and/or LRRTRLHKLSARREERVQGFLQALELKR (SEQ ID NO:638). Moreover, fragments and variants of these polypeptides (such as, for example, fragments as described herein, polypeptides at least 80%, 85%, 90%, 95%, 96%, 97%, 98%, or 99% identical to these polypeptides and polypeptides encoded by the polynucleotide which hybridizes, under stringent conditions, to the polynucleotide encoding these polypeptides) are encompassed by the invention. Antibodies that bind polypeptides of the invention are also encompassed by the invention. Polynucleotides encoding these polypeptides are also encompassed by the invention.

[0373] This gene is expressed primarily in human cardiomyopathy tissue, and to a lesser extent, in T helper cells, fetal brain and synovial sarcoma.

[0374] Polynucleotides and polypeptides of the invention are useful as reagents for differential identification of the tissue(s) or cell type(s) present in a biological sample and for diagnosis of diseases and conditions which include, but are not limited to, cardiovascular, immune, or developmental disorders, particularly cardiomyopathy which occur secondary to viral infections. Similarly, polypeptides and antibodies directed to these polypeptides are useful in providing immunological probes for differential identification of the tissue(s) or cell type(s). For a number of disorders of the above tissues or cells, particularly of the cardiovascular system, expression of this gene at significantly higher or lower levels may be routinely detected in certain tissues or cell types (e.g., cardiovascular, neural, developmental, skeletal, immune cancerous and wounded tissues) or bodily fluids (e.g., lymph, amniotic fluid, serum, plasma, urine, synovial fluid and spinal fluid) or another tissue or cell sample taken from an individual having such a disorder, relative to the standard gene expression level, i.e., the expression level in healthy tissue or bodily fluid from an individual not having the disorder.

[0375] Predicted epitopes include those comprising a sequence shown in SEQ ID NO:295 as residues: Trp-20 to Cys-26.

[0376] The tissue distribution in cardiomyopathy tissue, combined with the homology to a viral 12 kD nucleic acid binding protein indicates that the protein product of this gene is useful for diagnosis and intervention of cardiomyopathy, including those caused by ischemic, hypertensive, congenital, valvular, or pericardial abnormalities. The gene expression pattern may be the consequence or the cause for these conditions. Protein, as well as, antibodies directed against the protein may show utility as a tumor marker and/or immunotherapy targets for the above listed tissues.

[0377] Many polynucleotide sequences, such as EST sequences, are publicly available and accessible through sequence databases. Some of these sequences are related to SEQ ID NO:57 and may have been publicly available prior to conception of the present invention. Preferably, such related polynucleotides are specifically excluded from the scope of the present invention. To list every related sequence is cumbersome. Accordingly, preferably excluded from the present invention are one or more polynucleotides comprising a nucleotide sequence described by the general formula of a-b, where a is any integer between 1 to 1038 of SEQ ID NO:57, b is an integer of 15 to 1052, where both a and b correspond to the positions of nucleotide residues shown in SEQ ID NO:57, and where b is greater than or equal to a+14.

[0378] Features of Protein Encoded by Gene No: 48

[0379] The translation product of this gene shares sequence homology with tumor necrosis factor related gene product, which is thought to be important in tumor necrosis, bacterial and viral infection, immune diseases and immunoreactions.

[0380] In specific embodiments, polypeptides of the invention comprise, or alternatively consist of, the following amino acid sequences: KMNSIPWQIPKITPXLDANLVIVECKPLWFCIGTIKQLKLWNQVFMGFKSMFF RIGKLNYLFTIPYCYLFIDNILGIFYSILGAQGIKYNFYIQRIFTCLLNLNLKIHSN LA (SEQ ID NO:639), LWFCIGTIKQLKLWNQVFMGFKSMFFR (SEQ ID NO:640), YSILGAQGIKYNFYIQRIFTCLLNLN (SEQ ID NO:641), and/or TFKLVRFLE (SEQ ID NO:642). Moreover, fragments and variants of these polypeptides (such as, for example, fragments as described herein, polypeptides at least 80%, 85%, 90%, 95%, 96%, 97%, 98%, or 99% identical to these polypeptides and polypeptides encoded by the polynucleotide which hybridizes, under stringent conditions, to the polynucleotide encoding these polypeptides) are encompassed by the invention. Antibodies that bind polypeptides of the invention are also encompassed by the invention. Polynucleotides encoding these polypeptides are also encompassed by the invention.

[0381] The gene encoding the disclosed cDNA is believed to reside on chromosome 10. Accordingly, polynucleotides related to this invention are useful as a marker in linkage analysis for chromosome 10.

[0382] This gene is expressed primarily in colon, and to a lesser extent, in ovarian and breast cancers.

[0383] Polynucleotides and polypeptides of the invention are useful as reagents for differential identification of the tissue(s) or cell type(s) present in a biological sample and for diagnosis of diseases and conditions which include, but are not limited to, gastrointestinal, reproductive, colon, ovarian, breast disorders, particularly cancers. Similarly, polypeptides and antibodies directed to these polypeptides are useful in providing immunological probes for differential identification of the tissue(s) or cell type(s). For a number of disorders of the above tissues or cells, particularly of the colon, ovary and breast, expression of this gene at significantly higher or lower levels may be routinely detected in certain tissues or cell types (e.g., gastrointestinal, reproductive, colon, ovarian, breast, and cancerous and wounded tissues) or bodily fluids (e.g., lymph, breast milk, bile, serum, plasma, urine, synovial fluid and spinal fluid) or another tissue or cell sample taken from an individual having such a disorder, relative to the standard gene expression level, i.e., the expression level in healthy tissue or bodily fluid from an individual not having the disorder.

[0384] The tissue distribution in colon tissue, combined with the homology to tumor necrosis factors indicates that the protein product of this gene is useful for the intervention of cancers of the colon, ovary and breast, particularly because TNF family members are known to be involved in the tumor development. Protein, as well as, antibodies directed against the protein may show utility as a tumor marker and/or immunotherapy targets for the above listed tissues.

[0385] Many polynucleotide sequences, such as EST sequences, are publicly available and accessible through sequence databases. Some of these sequences are related to SEQ ID NO:58 and may have been publicly available prior to conception of the present invention. Preferably, such related polynucleotides are specifically excluded from the scope of the present invention. To list every related sequence is cumbersome. Accordingly, preferably excluded from the present invention are one or more polynucleotides comprising a nucleotide sequence described by the general formula of a-b, where a is any integer between 1 to 800 of SEQ ID NO:58, b is an integer of 15 to 814, where both a and b correspond to the positions of nucleotide residues shown in SEQ ID NO:58, and where b is greater than or equal to a+14.

[0386] Features of Protein Encoded by Gene No: 49

[0387] The translation product of this gene shares sequence homology with mucins, such as epithelial mucin, which are thought to be important in extracellular matrix functions such as protection, lubrication and cell adhesion, which are important in a variety of functions, particularly immune chemotaxis and infiltration (See for example Genbank Accession No. R68002).

[0388] In specific embodiments, polypeptides of the invention comprise, or alternatively consists of, an amino acid sequence selected from the group: PRSRPALRPGRQRPPSHSATSGVLRPRKKPDP (SEQ ID NO:643), RKSFAKPVLWTNAIQAGRGRVLCYTRPPPASSSFSALVPDGNRMEGLRTYFL NAFDPGTDYLYLFPFSFTVTFQHCLTVRWAFESLQVPQNRPERWASHPLPTH XPAYLPDNQVXMSASG (SEQ ID NO:644), GNRMEGLRTYFLNAFDPGTDYLYLF (SEQ ID NO:645), and/or FQHCLTVRWAFESLQVPQNRPERWASHPLP (SEQ ID NO:646). Moreover, fragments and variants of these polypeptides (such as, for example, fragments as described herein, polypeptides at least 80%, 85%, 90%, 95%, 96%, 97%, 98%, or 99% identical to these polypeptides and polypeptides encoded by the polynucleotide which hybridizes, under stringent conditions, to the polynucleotide encoding these polypeptides) are encompassed by the invention. Antibodies that bind polypeptides of the invention are also encompassed by the invention. Polynucleotides encoding these polypeptides are also encompassed by the invention

[0389] Moreover, this gene maps to chromosome 22q11.2-qter, and therefore, can be used as a marker in linkage analysis for chromosome 22.

[0390] This gene is expressed primarily in corpus colosum.

[0391] Polynucleotides and polypeptides of the invention are useful as reagents for differential identification of the tissue(s) or cell type(s) present in a biological sample and for diagnosis of diseases and conditions which include, but are not limited to, tumors, especially of the corpus colosum, as well as metastatic lesions, autoimmune conditions, and integumentary disorders. Similarly, polypeptides and antibodies directed to these polypeptides are useful in providing immunological probes for differential identification of the tissue(s) or cell type(s). For a number of disorders of the above tissues or cells, particularly of the corpus colosum and other solid tissues, expression of this gene at significantly higher or lower levels may be routinely detected in certain tissues or cell types (e.g., integumentary, autoimmune, neural, and cancerous and wounded tissues) or bodily fluids (e.g., lymph, serum, plasma, urine, synovial fluid and spinal fluid) or another tissue or cell sample taken from an individual having such a disorder, relative to the standard gene expression level, i.e., the expression level in healthy tissue or bodily fluid from an individual not having the disorder.

[0392] The tissue distribution in corpus colosum, combined with the homology to mucins indicates that the protein product of this gene is useful for serum tumor markers or immunotherapy targets because tumor cells have greatly elevated levels of mucin expression and shed the molecules into the epithelial tissues. Moreover, the protein product of this gene is useful for the treatment, diagnosis, and/or prevention of various skin disorders including congenital disorders (i.e. nevi, moles, freckles, Mongolian spots, hemangiomas, port-wine syndrome), integumentary tumors (i.e. keratoses, Bowen's disease, basal cell carcinoma, squamous cell carcinoma, malignant melanoma, Paget's disease, mycosis fungoides, and Kaposi's sarcoma), injuries and inflammation of the skin (i.e. wounds, rashes, prickly heat disorder, psoriasis, dermatitis), atherosclerosis, uticaria, eczema, photosensitivity, autoimmune disorders (i.e. lupus erythematosus, vitiligo, dermatomyositis, morphea, scleroderma, pemphigoid, and pemphigus), keloids, striae, erythema, petechiae, purpura, and xanthelasma. In addition, such disorders may predispose increased susceptibility to viral and bacterial infections of the skin (i.e. cold sores, warts, chickenpox, molluscum contagiosum, herpes zoster, boils, cellulitis, erysipelas, impetigo, tinea, Althlete's foot, and ringworm). Moreover, the protein product of this gene may also be useful for the treatment or diagnosis of various connective tissue disorders such as arthritis, trauma, tendonitis, chrondomalacia and inflammation, autoimmune disorders such as rheumatoid arthritis, lupus, scleroderma, and demiatomyositis as well as dwarfism, spinal deformation, and specific joint abnormalities as well as chondrodysplasias (i.e. spondyloepiphyseal dysplasia corigenita, familial osteoarthritis, Atelosteogenesis type II, metaphyseal chondrodysplasia type Schmid). Protein, as well as, antibodies directed against the protein may show utility as a tumor marker and/or immunotherapy targets for the above listed tissues.

[0393] Many polynucleotide sequences, such as EST sequences, are publicly available and accessible through sequence databases. Some of these sequences are related to SEQ ID NO:59 and may have been publicly available prior to conception of the present invention. Preferably, such related polynucleotides are specifically excluded from the scope of the present invention. To list every related sequence is cumbersome. Accordingly, preferably excluded from the present invention are one or more polynucleotides comprising a nucleotide sequence described by the general formula of a-b, where a is any integer between 1 to 1201 of SEQ ID NO:59, b is an integer of 15 to 1215, where both a and b correspond to the positions of nucleotide residues shown in SEQ ID NO:59, and where b is greater than or equal to a+14.

[0394] Features of Protein Encoded by Gene No: 50

[0395] This gene is expressed primarily in CD34 depleted buffy coat cord blood and primary dendritic cells.

[0396] Polynucleotides and polypeptides of the invention are useful as reagents for differential identification of the tissue(s) or cell type(s) present in a biological sample and for diagnosis of diseases and conditions which include, but are not limited to, hematopoietic disorders and immunological disorders, particularly those related to developmental or reproductive conditions. Similarly, polypeptides and antibodies directed to these polypeptides are useful in providing immunological probes for differential identification of the tissue(s) or cell type(s). For a number of disorders of the above tissues or cells, particularly of the hematopoietic and immune systems, expression of this gene at significantly higher or lower levels may be routinely detected in certain tissues or cell types (e.g., developmental, immune, hematopoietic, and cancerous and wounded tissues) or bodily fluids (e.g., lymph, amniotic fluid, serum, plasma, urine, synovial fluid and spinal fluid) or another tissue or cell sample taken from an individual having such a disorder, relative to the standard gene expression level, i.e., the expression level in healthy tissue or bodily fluid from an individual not having the disorder.

[0397] The tissue distribution in CD34 depleted buffy coat cord blood and primary dendritic cells indicates that the protein product of this gene is useful for the diagnosis and treatment of hematopoietic and immune disorders. Secreted or cell surface proteins in the above tissue distribution often are involved in cell activation (e.g. cytokines) or molecules involved in cell surface activation. Moreover, the protein product of this gene is useful for the treatment and diagnosis of hematopoetic related disorders such as anemia, pancytopenia, leukopenia, thrombocytopenia or leukemia since stromal cells are important in the production of cells of hematopoietic lineages. The uses include bone marrow cell ex vivo culture, bone m arrow transplantation, bone marrow reconstitution, radiotherapy or chemotherapy of neoplasia. The gene product may also be involved in lymphopoiesis, therefore, it can be used in immune disorders such as infection, inflammation, allergy, immunodeficiency etc. In addition, this gene product may have commercial utility in the expansion of stem cells and committed progenitors of various blood lineages, and in the differentiation and/or proliferation of various cell types. Protein, as well as, antibodies directed against the protein may show utility as a tumor marker and/or immunotherapy targets for the above listed tissues.

[0398] Many polynucleotide sequences, such as EST sequences, are publicly available and accessible through sequence databases. Some of these sequences are related to SEQ ID NO:60 and may have been publicly available prior to conception of the present invention. Preferably, such related polynucleotides are specifically excluded from the scope of the present invention. To list every related sequence is cumbersome. Accordingly, preferably excluded from the present invention are one or more polynucleotides comprising a nucleotide sequence described by the general formula of a-b, where a is any integer between 1 to 464 of SEQ ID NO:60, b is an integer of 15 to 478, where both a and b correspond to the positions of nucleotide residues shown in SEQ ID NO:60, and where b is greater than or equal to a+14.

[0399] Features of Protein Encoded by Gene No: 51

[0400] The translation product of this gene shares sequence homology with Interferon induced 1-8 gene encoded polypeptide, which is thought to be important in binding to retroviral rev responsive elements and may be beneficial in the development of novel inhibitors of host-viral interactions leading to effective viral vaccines.

[0401] In specific embodiments, polypeptides of the invention comprise, or alternatively consists of, an amino acid sequence selected from the group: MTLITPSXKLTFXKGNKSWSSRACSSTLVDP (SEQ ID NO:647), FLFLHAVDPWPSNG (SEQ ID NO:648), WSCQSGVFLVFTGCSVLCQMLSGAVVVWRRSAPEDSAVWQASINKPRGKGR HGIKGENTSV (SEQ ID NO:649), and/or LVFTGC SVLCQMLSGAVVVWRRSAPEDSAVWQASI (SEQ ID NO:650). Moreover, fragments and variants of these polypeptides (such as, for example, fragments as described herein, polypeptides at least 80%, 85%, 90%, 95%, 96%, 97%, 98%, or 99% identical to these polypeptides and polypeptides encoded by the polynucleotide which hybridizes, under stringent conditions, to the polynucleotide encoding these polypeptides) are encompassed by the invention. Antibodies that bind polypeptides of the invention are also encompassed by the invention. Polynucleotides encoding these polypeptides are also encompassed by the invention.

[0402] This gene is expressed primarily in CD34 positive cells and neutrophils.

[0403] Polynucleotides and polypeptides of the invention are useful as reagents for differential identification of the tissue(s) or cell type(s) present in a biological sample and for diagnosis of diseases and conditions which include, but are not limited to, viral infection, such as AIDS, and other immune or hematopoietic disorders. Similarly, polypeptides and antibodies directed to these polypeptides are useful in providing immunological probes for differential identification of the tissue(s) or cell type(s). For a number of disorders of the above tissues or cells, particularly of the immune system, expression of this gene at significantly higher or lower levels may be routinely detected in certain tissues or cell types (e.g., immune, hematopoietic, and cancerous and wounded tissues) or bodily fluids (e.g., lymph, amniotic fluid, serum, plasma, urine, synovial fluid and spinal fluid) or another tissue or cell sample taken from an individual having such a disorder, relative to the standard gene expression level, i.e., the expression level in healthy tissue or bodily fluid from an individual not having the disorder.

[0404] Predicted epitopes include those comprising a sequence shown in SEQ ID NO:299 as residues: Gln-51 to Trp-62.

[0405] The tissue distribution in neutrophils and CD34 positive cells, combined with the homology to interferon induced gene 1-8 indicates that the protein product of this gene is useful for the intervention of retroviral infection including HIV. The factor may be involved in viral stability or viral entry into the cells. Alternatively, the virus/factor complex may elicit the cellular immune reaction and could possibly play a beneficial role in the development of effective inhibitors of host-viral interactions, such as exists for novel viral vaccines. Moreover, this gene product may be involved in the regulation of cytokine production, antigen presentation, or other processes that may also suggest a usefulness in the treatment of cancer (e.g. by boosting immune responses). Since the gene is expressed in cells of lymphoid origin, the natural gene product may be involved in immune functions. Therefore it may be also used as an agent for immunological disorders including arthritis, asthma, immunodeficiency diseases such as AIDS, leukemia, rheumatoid arthritis, granulomatous disease, inflammatory bowel disease, sepsis, acne, neutropenia, neutrophilia, psoriasis, hypersensitivities, such as T-cell mediated cytotoxicity; immune reactions to transplanted organs and tissues, such as host-versus-graft and graft-versus-host diseases, or autoimmunity disorders, such as autoimmune infertility, lens tissue injury, demyelination, systemic lupus erythematosis, drug induced hemolytic anemia, rheumatoid arthritis, Sjogren's disease, scleroderma and tissues. In addition, this gene product may have commercial utility in the expansion of stem cells and committed progenitors of various blood lineages, and in the differentiation and/or proliferation of various cell types. Protein, as well as, antibodies directed against the protein may show utility as a tumor marker and/or immunotherapy targets for the above listed tissues.

[0406] Many polynucleotide sequences, such as EST sequences, are publicly available and accessible through sequence databases. Some of these sequences are related to SEQ ID NO:61 and may have been publicly available prior to conception of the present invention. Preferably, such related polynucleotides are specifically excluded from the scope of the present invention. To list every related sequence is cumbersome. Accordingly, preferably excluded from the present invention are one or more polynucleotides comprising a nucleotide sequence described by the general formula of a-b, where a is any integer between 1 to 604 of SEQ ID NO:61, b is an integer of 15 to 618, where both a and b correspond to the positions of nucleotide residues shown in SEQ ID NO:61, and where b is greater than or equal to a+14.

[0407] Features of Protein Encoded by Gene No: 52

[0408] This gene shares sequence homology to immunoglobulin lambda chain (See Genbank Accession No. 2865484). Therefore it is likely that this gene has activity similar to an immunoglobulin lambda chain and may play a beneficial role in the development of effective immunotherapy-based toxins.

[0409] In specific embodiments, polypeptides of the invention comprise, or alternatively consists of, an amino acid sequence selected from the group: GHPSPALSIAPSDGSQLPCDEVPYGEAHVTRYCKKPLTNSHLETEAQSSSL (SEQ ID NO:651), NNKHYLSFCGSGFCPVYLGFTGLASHQAVKVLVVAVIIPRQDRERICLQAQV GRIHLRGCWTGPPFLDGYWSEAFYNTLSRGPLHRAIPHHMATGFHQREQWKE QEKGDQGRHRSLLVASPQKRCYFCCILXVRSESLGPGVEFYXGVNGRR (SEQ ID NO:652), ERICLQAQVGRIHLRGCWTGPPFLDGYWSEAF (SEQ ID NO:653), SDGSQLPCDEVPYGEAHVTRYCKKPL (SEQ ID NO:654), and/or HQREQWKEQEKGDQGRHRSLLVASPQK (SEQ ID NO:655). Moreover, fragments and variants of these polypeptides (such as, for example, fragments as described herein, polypeptides at least 80%, 85%, 90%, 95%, 96%, 97%, 98%, or 99% identical to these polypeptides and polypeptides encoded by the polynucleotide which hybridizes, under stringent conditions, to the polynucleotide encoding these polypeptides) are encompassed by the invention. Antibodies that bind polypeptides of the invention are also encompassed by the invention. Polynucleotides encoding these polypeptides are also encompassed by the invention.

[0410] This gene is expressed primarily in Hodgkin's lymphoma.

[0411] Polynucleotides and polypeptides of the invention are useful as reagents for differential identification of the tissue(s) or cell type(s) present in a biological sample and for diagnosis of diseases and conditions which include, but are not limited to, Hodgkin's lymphoma and other immune or hematopoietic disorders. Similarly, polypeptides and antibodies directed to these polypeptides are useful in providing immunological probes for differential identification of the tissue(s) or cell type(s). For a number of disorders of the above tissues or cells, particularly of the immune system, expression of this gene at significantly higher or lower levels may be routinely detected in certain tissues or cell types (e.g., immune, hematopoietic, and cancerous and wounded tissues) or bodily fluids (e.g., lymph, serum, plasma, urine, synovial fluid and spinal fluid) or another tissue or cell sample taken from an individual having such a disorder, relative to the standard gene expression level, i.e., the expression level in healthy tissue or bodily fluid from an individual not having the disorder.

[0412] Predicted epitopes include those comprising a sequence shown in SEQ ID NO:300 as residues: Pro-27 to Thr-32.

[0413] The tissue distribution in Hodgkin's lymphoma, combined with the sequence homology to immunoglobulin lambda chain protein indicates that the protein product of this gene is useful for the diagnosis of Hodgkin's lymphoma, since the elevated expression and secretion by the tumor mass may be indicative of tumors of this type. Additionally the gene product may be used as a target in the immunotherapy of the cancer. Because the gene is expressed in cells of lymphoid origin, the natural gene product may be involved in immune functions. Therefore it may be also used as an agent for immunological disorders including arthritis, asthma, immune deficiency diseases such as AIDS, and leukemia. Protein, as well as, antibodies directed against the protein may show utility as a tumor marker and/or immunotherapy targets for the above listed tissues.

[0414] Many polynucleotide sequences, such as EST sequences, are publicly available and accessible through sequence databases. Some of these sequences are related to SEQ ID NO:62 and may have been publicly available prior to conception of the present invention. Preferably, such related polynucleotides are specifically excluded from the scope of the present invention. To list every related sequence is cumbersome. Accordingly, preferably excluded from the present invention are one or more polynucleotides comprising a nucleotide sequence described by the general formula of a-b, where a is any integer between 1 to 737 of SEQ ID NO:62, b is an integer of 15 to 751, where both a and b correspond to the positions of nucleotide residues shown in SEQ ID NO:62, and where b is greater than or equal to a+14.

[0415] Features of Protein Encoded by Gene No: 53

[0416] This gene has extensive homology to cDNA for Homo sapiens mRNA for the ISLR gene (See Genbank Accession No. AB003184). This protein is considered to be a new member of the Ig superfamily and contains a leuc ine-rich repeat (LRR) with conserved flanking sequences and a C2-type immunoglobulin (Ig)-like domain. These domains are important for protein-protein interaction or cell adhesion, and therefore it is possible that the novel protein ISLR may also interact with other proteins or cells. The ISLR gene was mapped on human chromosome 15q23-q24 by fluorescence in situ hybridization (See Medline Article Nc. 97468140). Homology to the ISLR gene has been confirmed by another independent group as well (See Genbank Accession No. Hs.102171).

[0417] This gene is expressed in a number of tissues including human retina, heart, skeletal muscle, prostate, ovary, small intestine, thyroid, adrenal cortex, testis, stomach, spinal cord, fetal lung and fetal kidney tissues, colon, tonsil and stomach cancer, and to a lesser extent in endometrial stromal cells treated with estradiol, breast tissue, synovium, lymphoma, and number of other tumors.

[0418] Polynucleotides and polypeptides of the invention are useful as reagents for differential identification of the tissue(s) or cell type(s) present in a biological sample and for diagnosis of diseases and conditions which include, but are not limited to, tumors of colon, ovary, breast, and integumentary or immune origins. However, due to the wide range of expression in various tissues, protein may play a vital role in the development of cancer in other tissues as well, not just those mentioned above. Similarly, polypeptides and antibodies directed to these polypeptides are useful in providing immunological probes for differential identification of the tissue(s) or cell type(s). For a number of disorders of the above tissues or cells, particularly of the colon, ovary and breast, expression of this gene at significantly higher or lower levels may be routinely detected in certain tissues or cell types (e.g., immune, integumentary, reproductive, developmental, and cancerous and wounded tissues) or bodily fluids (e.g., lymph, amniotic fluid, breast milk, seminal fluid, bile, serum, plasma, urine, synovial fluid and spinal fluid) or another tissue or cell sample taken from an individual having such a disorder, relative to the standard gene expression level, i.e., the expression level in healthy tissue or bodily fluid from an individual not having the disorder. Additionally, this gene maps to chromosome 15q23-q24, and therefore, can be used as a marker in linkage analysis for chromosome 15.

[0419] The tissue distribution in tumors of colon, ovary, and breast origins indicates that the protein product of this gene is useful for the diagnosis and intervention of these tumors, in addition to other tumors where expression has been indicated. The secreted protein can also be used to determine biological activity, to raise antibodies, as tissue markers, to isolate cognate ligands or receptors, to identify agents that modulate their interactions and as nutritional supplements. It may also have a very wide range of biological activities. Typical of these are cytokine, cell proliferation/differentiation modulating activity or induction of other cytokines; immunostimulating/immunosuppressant activities (e.g. for treating human immunodeficiency virus infection, cancer, autoimmune diseases and allergy); regulation of hematopoiesis (e.g. for treating anemia or as adjunct to chemotherapy); stimulation or growth of bone, cartilage, tendons, ligaments and/or nerves (e.g. for treating wounds); stimulation of follicle stimulating hormone (for control of fertility); chemotactic and chemokinetic activities (e.g. for treating infections, tumors); hemostatic or thrombolytic activity (e.g. for treating hemophilia, cardiac infarction, etc.); anti-inflammatory activity (e.g. for treating septic shock, Crohn's disease); as antimicrobials; for treating psoriasis or other hyperproliferative diseases; for regulation of metabolism, and behavior. Also contemplated is the use of the corresponding nucleic acid in gene therapy procedures. Protein, as well as, antibodies directed against the protein may show utility as a tumor marker and/or immunotherapy targets for the above listed tissues.

[0420] Many polynucleotide sequences, such as EST sequences, are publicly available and accessible through sequence databases. Some of these sequences are related to SEQ ID NO:63 and may have been publicly available prior to conception of the present invention. Preferably, such related polynucleotides are specifically excluded from the scope of the present invention. To list every related sequence is cumbersome. Accordingly, preferably excluded from the present invention are one or more polynucleotides comprising a nucleotide sequence described by the general formula of a-b, where a is any integer between 1 to 766 of SEQ ID NO:63, b is an integer of 15 to 780, where both a and b correspond to the positions of nucleotide residues shown in SEQ ID NO:63, and where b is greater than or equal to a+14.

[0421] Features of Protein Encoded by Gene No: 54

[0422] The gene has homology to a multidrug resistance gene 1 (See Genbank Accession No. PO₆₇₉₅).

[0423] Preferred polynucleotide fragments comprise the following sequence: gcttcgtgtccaaccctcttgcccttcgcctgtgtgcctggagccagtcccaccacgctcgcgtttcctcctgtagtgctcaca ggtcccagcaccgatggcattccctttgccctgagtctgcagcgggtcccttttgtgcttccttccctcaggtagcctctctc cccctgggccactcccgggggtgagggggttaccocttcccagtgttttttattcctgtggggctcaccccaaagtattaaaa gtagctttgtaa (SEQ ID NO:656), gcttcgtgtccaaccctcttgcccttcgcctgtgtgcctggagccagtcccaccacgctcgcgtttcctcctgtagtgctcaca ggtcccagcacegatggcattccctttgccctgagtctgcagcgggtcccttttgtggcttccttcccctcaggtagcctctctc cccctgggccactcccgggggtgagggggttaccccttcccagtgttttttattcctgtggggctcaccccaaagtattaaaa gtagctttgtaa (SEQ ID NO:657), gcttcgtgtccaaccctcttgcccttcgcctgtgtgcctggagccagtcccaccae gctcgcgtttcctcctgtagtgctcaca ggtcccagcaccgatggcattccctttgccctgagtctgcagcgggtcccttttgtgcttccttcccctcaggtagcctctctc ccctgggccactcccgggggtgagggggttaccccttcccagtgttttttattcctgtggggctcaccccaaagtattaaaa gtagctttgtaa (SEQ ID NO:658). Also preferred are polypeptides comprising one or more of the fragments encoded by these polynucleotide fragments.

[0424] In specific embodiments, polypeptides of the invention comprise, or alternatively consists of, an amino acid sequence selected from the group: FRINRLTIGXAVAMTRGNQRELARQKNMKKQSDSVKGKRRDDGLSAAARK QRDSEI (SEQ ID NO:659), AVAMTRGNQRELARQKNMKKQSDSVKGKR (SEQ ID NO:660), KSRATRLRESAEMTGFLLPPASRGTRRSCSRSRKRQTRRRRNPSSFVASCPTLL PFACVPGASPTTLAFPPVVLTGPSTDGIPFALSLQRVPFVLPSPQVASLPLGHSR G (SEQ ID NO:661), LRESAEMTGFLLPPASRGTRRSCSRS (SEQ ID NO:662), and/or VVLTGPSTDGIPFALSLQRVPFVLPSPQVA (SEQ ID NO:663). Moreover, fragments and variants of these polypeptides (such as, for example, fragments as described herein, polypeptides at least 80%, 85%, 90%, 95%, 96%, 97%, 98%, or 99% identical to these polypeptides and polypeptides encoded by the polynucleotide which hybridizes, under stringent conditions, to the polynucleotide encoding these polypeptides) are encompassed by the invention. Antibodies that bind polypeptides of the invention are also encompassed by the invention. Polynucleotides encoding these polypeptides are also encompassed by the invention.

[0425] This gene is expressed primarily in lung, esophagus, leukemia (Jurkat cells), breast cancers and to a lesser extent, in macrophages treated with GM-CSF fetal tissues.

[0426] Polynucleotides and polypeptides of the invention are useful as reagents for differential identification of the tissue(s) or cell type(s) present in a biological sample and for diagnosis of diseases and conditions which include, but are not limited to, immune, developmental, or pulmonary disorders, particularly cancers. Similarly, polypeptides and antibodies directed to these polypeptides are useful in providing immunological probes for differential identification of the tissue(s) or cell type(s). For a number of disorders of the above tissues or cells, particularly of the solid tumors, lung and leukemia, expression of this gene at significantly higher or lower levels may be routinely detected in certain tissues or cell types (e.g., immune, developmental, pulmonary, and cancerous and wounded tissues) or bodily fluids (e.g., lymph, pulmonary surfactant and sputum, amniotic fluid, serum, plasma, urine, synovial fluid and spinal fluid) or another tissue or cell sample taken from an individual having such a disorder, relative to the standard gene expression level, i.e., the expression level in healthy tissue or bodily fluid from an individual not having the disorder. Furthermore, due to the high expression level in lung tissue and the proposed function of the multidrug resistance protein 1 gene as the efflux pump responsible for low-drug accumulation in multidrug-resistant cells, protein as well mutants thereof, may also be beneficial as a target for gene therapy, particularly for the chronic patient.

[0427] Predicted epitopes include those comprising a sequence shown in SEQ ID NO:302 as residues: Met-1 to Lys-16.

[0428] The tissue distribution cancers and fetal tissues indicates that the protein product of this gene is useful for the detection of cells in active proliferation, such as cancers. The gene products may be used for cancer markers or immunotherapy target. Similarly, the secreted protein can also be used to determine biological activity, to raise antibodies, as tissue markers, to isolate cognate ligands or receptors, to identify agents that modulate their interactions and as nutritional supplements. It may also have a very wide range of biological activities. Typical of these are cytokine, cell proliferation/differentiation modulating activity or induction of other cytokines; immunostimulating/immunosuppressant activities (e.g. for treating human immunodeficiency virus infection, cancer, autoimmune diseases and allergy); regulation of hematopoiesis (e.g. for treating anemia or as adjunct to chemotherapy); stimulation or growth of bone, cartilage, tendons, ligaments and/or nerves (e.g. for treating wounds); stimulation of follicle stimulating hormone (for control of fertility); chemotactic and chemokinetic activities (e.g. for treating infections, tumors); hemostatic or thrombolytic activity (e.g. for treating hemophilia, cardiac infarction, etc.); anti-inflammatory activity (e.g. for treating septic shock, Crohn's disease); as antimicrobials; for treating psoriasis or other hyperproliferative diseases; for regulation of metabolism, and behavior. Also contemplated is the use of the corresponding nucleic acid in gene therapy procedures. Protein, as well as, antibodies directed against the protein may show utility as a tumor marker and/or immunotherapy targets for the above listed tissues.

[0429] Many polynucleotide sequences, such as EST sequences, are publicly available and accessible through sequence databases. Some of these sequences are related to SEQ ID NO:64 and may have been publicly available prior to conception of the present invention. Preferably, such related polynucleotides are specifically excluded from the scope of the present invention. To list every related sequence is cumbersome. Accordingly, preferably excluded from the present invention are one or more polynucleotides comprising a nucleotide sequence described by the general formula of a-b, where a is any integer between 1 to 574 of SEQ ID NO:64, b is an integer of 15 to 588, where both a and b correspond to the positions of nucleotide residues shown in SEQ ID NO:64, and where b is greater than or equal to a+14.

[0430] Features of Protein Encoded by Gene No: 55

[0431] In specific embodiments, polypeptides of the invention comprise, or alternatively consists of, an amino acid sequence selected from the group: LLSTSHLLTQSYSFNKRSHSFAWKNAHCILQSENNELQNSVYIYVCIYVHF ICTFLCDI (SEQ ID NO:664), and/or KRSHSFAWKNAHCILQSENNELQNSVYIY VCI (SEQ ID NO:665). Moreover, fragments and variants of these polypeptides (such as, for example, fragments as described herein, polypeptides at least 80%, 85%, 90%, 95%, 96%, 97%, 98%, or 99% identical to these polypeptides and polypeptides encoded by the polynucleotide which hybridizes, under stringent conditions, to the polynucleotide encoding these polypeptides) are encompassed by the invention. Antibodies that bind polypeptides of the invention are also encompassed by the invention. Polynucleotides encoding these polypeptides are also encompassed by the invention.

[0432] The gene encoding the disclosed cDNA is believed to reside on the X chromosome. Accordingly, polynucleotides related to this invention are useful as a marker in linkage analysis for the X chromosome.

[0433] This gene is expressed primarily in the brain, and to a lesser extent, in the developing embryo.

[0434] Polynucleotides and polypeptides of the invention are useful as reagents for differential identification of the tissue(s) or cell type(s) present in a biological sample and for diagnosis of diseases and conditions which include, but are not limited to, neurodegenerative disease states and developmental disorders. Similarly, polypeptides and antibodies directed to these polypeptides are useful in providing immunological probes for differential identification of the tissue(s) or cell type(s). For a number of disorders, including X-linked disorders, of the above tissues or cells, particularly of the neurological, developmental systems, and cardiovascular system, expression of this gene at significantly higher or lower levels may be routinely detected in certain tissues or cell types (e.g., neural, developmental, and cancerous and wounded tissues) or bodily fluids (e.g., lymph, amniotic fluid, serum, plasma, urine, synovial fluid and spinal fluid) or another tissue or cell sample taken from an individual having such a disorder, relative to the standard gene expression level, i.e., the expression level in healthy tissue or bodily fluid from an individual not having the disorder.

[0435] The tissue distribution in neural tissue indicates that the protein product of this gene is useful for the detection/treatment of neurodegenerative disease states and behavioral disorders such as Alzheimer's Disease, Parkinson's Disease, Huntington's Disease, Klinefelter's, schizophrenia, mania, dementia, paranoia, obsessive compulsive disorder and panic disorder. In addition, the gene or gene product may also play a role in the treatment and/or detection of developmental disorders associated with the developing embryo, sexually- or X-linked disorders, or disorders of the cardiovascular system. Protein, as well as, antibodies directed against the protein may show utility as a tumor marker and/or immunotherapy targets for the above listed tissues.

[0436] Many polynucleotide sequences, such as EST sequences, are publicly available and accessible through sequence databases. Some of these sequences are related to SEQ ID NO:65 and may have been publicly available prior to conception of the present invention. Preferably, such related polynucleotides are specifically excluded from the scope of the present invention. To list every related sequence is cumbersome. Accordingly, preferably excluded from the present invention are one or more polynucleotides comprising a nucleotide sequence described by the general formula of a-b, where a is any integer between 1 to 931 of SEQ ID NO:65, b is an integer of 15 to 945, where both a and b correspond to the positions of nucleotide residues shown in SEQ ID NO:65, and where b is greater than or equal to a+14.

[0437] Features of Protein Encoded by Gene No: 56

[0438] The translation product of this gene shares sequence homology with paxillin, which is thought to be important in mediating signal transduction from growth factor receptors to the cytoskeleton. Moreover, in normal hematopoietic cells and myeloid cell lines, tyrosine phosphorylation of paxillin has been shown to be rapidly and transiently induced by interleukin-3 and several other hematopoietic growth factors. The predicted structure of paxillin implicates this molecule in protein-protein interactions involved in signal transduction from growth factor receptors and the BCR/ABL oncogene fusion protein to the cytoskeleton.

[0439] Preferred polynucleotide fragments comprise the following sequence: tggctcactgtcttacaatcactgctgtggaatcatgataccacttttagctctttgcaticttccttcagtgtatttttgtttttcaaga ggaagtagattttaactggacaactttgagtactgacatcattgataaataaactggcttgtggtttcaa (SEQ ID NO:666). Also preferred are polypeptide fragments encoded by these polynucleotide fragments.

[0440] In specific embodiments, polypeptides of the invention comprise, or alternatively consists of, an amino acid sequence selected from the group:

(SEQ ID NO:667)

LDELMAHLTEMQAKVAVRADAGKKHLPDKQDHKASLDSMLGGLEQELQDL
GIATVPKGHCASCQKPIAGKVIHALGQSWHPEHFVCTHCKEEIGSSPFFE
RSGLXYCPNDHQLFSPRCAYCAAPILDKVLTAMNQTWHPEHFFCSHCGEV
FGAEGFHEKDKKPYCRKDFLAMFSPKCGGCNRPVLENYLSAMDTVWHPEC
FVCGDCFTSFSTGSFFELDGRPFCELHYHHRRGTLCHGCGQPITGRCISA
MGYKFHPEHFVCAFCLTQLSKGIFREQNDKTYCQPCFNKLF,

(SEQ ID NO:668)

KASLDSMLGGLEQELQDLGIATVPKGHCASCQKPIAGKVIHAL,

(SEQ ID NO:669)

CPNDYHQLFSPRCAYCAAPILDKVLTAMNQTWHPEHFFCSHCGEVFGAE
G,

(SEQ ID NO:670)

DKKPYCRKDFLAMFSPKCGGCNRPVLENYLSAMDTVWHPECFVCGDCFTS
FSTGSFFELDGRPFCEL,

(SEQ ID NO:671)

CGQPITGRCISAMGYKFHPEHFVCAFCLTQLSKGIFREQNDKTYCQ,

(SEQ ID NO:672)

HKSLAGAXVYTTNIQELNVYSEAQEPKESPPPSKTSAAAQLDELMAHLTE
MQAKVAVRADAGKKHLPDKQDHKASLDSMLGGLEQELQDLGIATVPKGHC
ASCQKPIAGKVIHALGQSWHPEHFVCTHCKEEIGSSPFFERSGLXYCPND
YHQLFSPRCAYCAAPILDKVLTAMNQTWHPEHFFCSHCGEVFGAEGFHEK
DKKPYCRKDFLAMFSPKCGGCNRPVLENYLSAMDTVWHPECFVCGDCFTS
FSTGSFFELDGRPFCELHYHHRRGTLCHGCGQPITGRCISAMGYKFHPEH
FVCAFCLTQLSKGIFREQNDKTYCQPCFNKLFPL,

(SEQ ID NO:673)

NVYSEAQEPKESPPPSKTSAAA,

(SEQ ID NO:674)

DSMLGGLEQELQDLGIATVPKGHCAS,

(SEQ ID NO:675)

YLSAMDTVWHPECFVCGDCFTSFSTG

(SEQ ID NO:676)

RCISAMGYKFHPEHFVCAFCLTQLSK,

(SEQ ID NO:677)

PTRPVLFFSTCQSCSSRPVRQEHLGCRTMEELDALLEELERSTLQDSDEY
SNPAPLPLDQHSRKETNLDETSEILSIQDNTSPLPAXSCILPISRSSMST
VKPKSQRNHHHLLKRQQLLSWMSSWLT,

(SEQ ID NO:678)

PVRQEHLGCRTMEELDALLEELERSTLQ,

(SEQ ID NO:679)

SCILPISRSSMSTVKPKSQRN,

(SEQ ID NO:680)

WHPEHFVCTHC,

(SEQ ID NO:681)

LFSPRC,

(SEQ ID NO:682)

PILDKV,

(SEQ ID NO:683)

TWHPEHFF,

(SEQ ID NO:684)

EGFHEKD,

(SEQ ID NO:685)

KFHPEHFVCAFCL,

(SEQ ID NO:686)

PITGRCI, and/or

(SEQ ID NO:687)

HPEHFVC.

[0441] Moreover, fragments and variants of these polypeptides (such as, for example, fragments as described herein, polypeptides at least 80%, 85%, 90%, 95%, 96%, 97%, 98%, or 99% identical to these polypeptides and polypeptides encoded by the polynucleotide which hybridizes, under stringent conditions, to the polynucleotide encoding these polypeptides) are encompassed by the invention. Antibodies that bind polypeptides of the invention are also encompassed by the invention. Polynucleotides encoding these polypeptides are also encompassed by the invention.

[0442] The gene encoding the disclosed cDNA is believed to reside on chromosome 11. Accordingly, polynucleotides related to this invention are useful as a marker in linkage analysis for chromosome 11.

[0443] This gene is expressed primarily in brain, and to a lesser extent in the developing embryo.

[0444] Polynucleotides and polypeptides of the invention are useful as reagents for differential identification of the tissue(s) or cell type(s) present in a biological sample and for diagnosis of diseases and conditions which include, but are not limited to, neurological disease states and developmental abnormalities. Similarly, polypeptides and antibodies directed to these polypeptides are useful in providing immunological probes for differential identification of the tissue(s) or cell type(s). For a number of disorders of the above tissues or cells, particularly of the immune and nervous systems, expression of this gene at significantly higher or lower levels may be routinely detected in certain tissues or cell types (e.g., neural, developmental, immune, hematopoietic, and cancerous and wounded tissues) or bodily fluids (e.g., lymph, amniotic fluid, serum, plasma, urine, synovial fluid and spinal fluid) or another tissue or cell sample taken from an individual having such a disorder, relative to the standard gene expression level, i.e., the expression level in healthy tissue or bodily fluid from an individual not having the disorder.

[0445] The tissue distribution in brain, combined with the homology to the conserved paxillin gene, indicates that the protein product of this gene is useful for the treatment and or detection of disease states associated with abnormal signal transduction in brain and/or the developing embryo. This would include treatment or detection of neurodegenerative disease states and behavioral disorders such as Alzheimer's Disease, Parkinson's Disease, Huntington's Disease, schizophrenia, mania, dementia, paranoia, obsessive compulsive disorder and panic disorder and also in the treatment and or detection of embryonic development defects. Moreover, expression within embryonic tissue and other cellular sources marked by proliferating cells indicates that this protein may play a role in the regulation of cellular division, and may show utility in the diagnosis and treatment of cancer and other proliferative disorders. Similarly, developmental tissues rely on decisions involving cell differentiation and/or apoptosis in pattern formation. Thus this protein may also be involved in apoptosis or tissue differentiation and could again be useful in cancer therapy. Protein, as well as, antibodies directed against the protein may show utility as a tumor marker and/or immunotherapy targets for the above listed tissues.

[0446] Many polynucleotide sequences, such as EST sequences, are publicly available and accessible through sequence databases. Some of these sequences are related to SEQ ID NO:66 and may have been publicly available prior to conception of the present invention. Preferably, such related polynucleotides are specifically excluded from the scope of the present invention. To list every related sequence is cumbersome. Accordingly, preferably excluded from the present invention are one or more polynucleotides comprising a nucleotide sequence described by the general formula of a-b, where a is any integer between 1 to 1852 of SEQ ID NO:66, b is an integer of 15 to 1866, where both a and b correspond to the positions of nucleotide residues shown in SEQ ID NO:66, and where b is greater than or equal to a+14.

[0447] Features of Protein Encoded by Gene No: 57

[0448] In specific embodiments, polypeptides of the invention comprise, or alternatively consists of, the following amino acid sequence: RIYCSEDTFSPXAESGVSWQSSVSQLYQDYE (SEQ ID NO:688). Moreover, fragments and variants of this polypeptide (such as, for example, fragments as described herein, polypeptides at least 80%, 85%, 90%, 95%, 96%, 97%, 98%, or 99% identical to these polypeptides and polypeptides encoded by the polynucleotide which hybridize, under stringent conditions, to the polynucleotide encoding this polypeptide are encompassed by the invention. Antibodie s that bind polypeptides of the invention are also encompassed by the invention. Polynucleotides encoding this polypeptide are also encompassed by the invention.

[0449] This gene is expressed primarily in fetal spleen, brain, and to a lesser extent, in six week old embryo.

[0450] Polynucleotides and polypeptides of the invention are useful as reagents for differential identification of the tissue(s) or cell type(s) present in a biological sample and for diagnosis of diseases and conditions which include, but are not limited to, immune disorders, neurological disorders, and developmental abnormalities. Similarly, polypeptides and antibodies directed to these polypeptides are useful in providing immunological probes for differential identification of the tissue(s) or cell type(s). For a number of disorders of the above tissues or cells, particularly of the immune and developmental systems, expression of this gene at significantly higher or lower levels may be routinely detected in certain tissues or cell types (e.g., immune, neural, developmental, and cancerous and wounded tissues) or bodily fluids (e.g., lymph, amniotic fluid, serum, plasma, urine, synovial fluid and spinal fluid) or another tissue or cell sample taken from an individual having such a disorder, relative to the standard gene expression level, i.e., the expression level in healthy tissue or bodily fluid from an individual not having the disorder.

[0451] Predicted epitopes include those comprising a sequence shown in SEQ ID NO:305 as residues: Arg-28 to Gly-34.

[0452] The tissue distribution in fetal spleen indicates that the protein product of this gene is useful for the treatment/detection of immune disorders such as arthritis, asthma, immune deficiency diseases such as AIDS, and leukemia. In addition the expression of this gene in the early embryo, indicates a key role in embryo development, and hence the gene or gene product could be used in the treatment and or detection of embryonic developmental defects. This would include treatment or detection of neurodegenerative disease states and behavioral disorders such as Alzheimer's Disease, Parkinson's Disease, Huntington's Disease, schizophrenia, mania, dementia, paranoia, obsessive compulsive disorder and panic disorder and also in the treatment and or detection of embryonic development defects. Protein, as well as, antibodies directed against the protein may show utility as a tumor marker and/or immunotherapy targets for the above listed tissues.

[0453] Many polynucleotide sequences, such as EST sequences, are publicly available and accessible through sequence databases. Some of these sequences are related to SEQ ID NO:67 and may have been publicly available prior to conception of the present invention. Preferably, such related polynucleotides are specifically excluded from the scope of the present invention. To list every related sequence is cumbersome. Accordingly, preferably excluded from the present invention are one or more polynucleotides comprising a nucleotide sequence described by the general formula of a-b, where a is any integer between 1 to 1138 of SEQ ID NO:67, b is an integer of 15 to 1152, where both a and b correspond to the positions of nucleotide residues shown in SEQ ID NO:67, and where b is greater than or equal to a+14.

[0454] Features of Protein Encoded by Gene No: 58

[0455] The translation product of this gene shares sequence homology with the gene disrupted in the neurodegenerative disease dentatorubal-pallidoluysian atrophy. Moreover, the translation product of this gene also shares homology with the GRASP65 protein, a protein involved in the stacking of Golgi cisternae (See Genbank Accession No. AF015264).

[0456] In specific embodiments, polypeptides of the invention comprise, or alternatively consists of, an amino acid sequence selected from the group:

(SEQ ID NO:689)

MGSSQSVEIPGGGTEGYHVLRVQENSPGHRAGLEPFFDFIVSINGSRLNK
DNDTLKDLLKXNVEKPVKMLIYSSKTLELRETSVTPSNLWGGQGLLGVSI
RFCSFDGANENVWHVLEVESNSPAALAGLRPHSDYIIGADTVMNESEDLF
SLIETHEAKPLKLYVYNTDTDNCREVIITPNSAWGGEGSLGCGIGYGYLH
RIPTRPFEEGKKISLPGQMAGTPITPLKDGFTEVQLSSVNPPSLSPPGTT
GIEQSLTGLSISSTPPAVSSVLSTGVPTVPLLPPQVNQSLTSVPPMNPAT
TLPGLMPLPAGLPNLPNLNLNLPAPHIMPGVGLPELVNPGLPPLPSMPPR
NLPGIAPLPLPSEFLPSFPLVPESSSAASSGELLSSLPPTSNAPSDPATT
TAKADAASSLTVDVTPPTAKAPTTVEDRVGDSTPVSEKPVSAAVDANASE
SP,

(SEQ ID NO:690)

SVEIPGGGTEGYHVLRVQENSPGHRAGLEPFFDFTVSINGSRLNKDNDTL
KDLLKXNVEKPVKMLIYSSKTLELRETSVTPSNLWGGQGLLGVSIRFCSF
DGANENVWH,

(SEQ ID NO:691)

ESNSPAALAGLRPHSDYIIGADTVMNESEDLFSLIETHEAKPLKLYVYNT
DTDNCREVIITPNSAWGGEGSLGCGIGYGYLHRIPTRPFEEGKKISLPGQ
MAGTPITPLKDGFTEVQLSSVNPPSLSPPGTTGIEQSLTGLSISS,

(SEQ ID NO:692)

ESNSPAALAGLRPHSDYIIGADTVMNESEDLFSLIETHEAKPLKLYVYNT
DTDNCREVIITPNSAWGGEGSLGCGIGYGYLHRIPTRPFEEGKKISLPGQ
MAGTPITPLKDGFTEVQLSSVNPPSLSPPGTTGIEQSLTGLSISS

(SEQ ID NO:693)

RIPTRPFEEGKKISLPGQMAGTPITPLKDGFTEVQLSSVNPPSLSPPGTT
GIEQSLTGLSISSTPPAVSSVLSTGVPTVPLLPPQVNQSLTSVPPMNPAT
TLPGLMPLPAGLPNLPNLNLNLPAPHIMPGVGLPELVNPGLPPLPSMPPR
N,

(SEQ ID NO:694)

PGLPPLPSMPPRNLPGIAPLPLPSEFLPSFPLVPESSSAASSGELLSSLP
PTSNAPSDPATTTAKADAASSLTVDVTPPTAKAPTTVEDRVGDSTPVSEK
PVSAAVDAN,

(SEQ ID NO:695)

AWGGEGSLGCGIGYGYLHRIPT,

(SEQ ID NO:696)

SPAALAGLRP, and/or

(SEQ ID NO:697)

WGGQGLLG.

[0457] Moreover, fragments and variants of these polypeptides (such as, for example, fragments as described herein, polypeptides at least 80%., 85%, 90%, 95%, 96%, 97%, 98%, or 99% identical to these polypeptides and polypeptides encoded by the polynucleotide which hybridizes, under stringent conditions, to the polynucleotide encoding these polypeptides) are encompassed by the invention. Antibodies that bind polypeptides of the invention are also encompassed by the invention. Polynucleotides encoding these polypeptides are also encompassed by the invention.

[0458] The gene encoding the disclosed cDNA is believed to reside on chromosome 2. Accordingly, polynucleotides related to this invention are useful as a marker in linkage analysis for chromosome 2.

[0459] This gene is expressed primarily in prostate cancer, and to a lesser extent, in the pineal glands and in fetal lung.

[0460] Polynucleotides and polypeptides of the invention are useful as reagents for differential identification of the tissue(s) or cell type(s) present in a biological sample and for diagnosis of diseases and conditions which include, but are not limited to, neurological, endocrine, reproductive, pulmonary, developmental disorders. Similarly, polypeptides and antibodies directed to these polypeptides are useful in providing immunological probes for differential identification of the tissue(s) or cell type(s). For a number of disorders of the above tissues or cells, particularly of the nervous, pulmonary, and endocrine systems, expression of this gene at significantly higher or lower levels may be routinely detected in certain tissues or cell types (e.g., neurological, endocrine, reproductive, pulmonary, developmental, and cancerous and wounded tissues) or bodily fluids (e.g., lymph, amniotic fluid, pulmonary surfactant and sputum, serum, plasma, urine, synovial fluid and spinal fluid) or another tissue or cell sample taken from an individual having such a disorder, relative to the standard gene expression level, i.e., the expression level in healthy tissue or bodily fluid from an individual not having the disorder.

[0461] Predicted epitopes include those comprising a sequence shown in SEQ ID NO:306 as residues: Asn-9 to Leu-14.

[0462] The abundance of this gene in the pineal gland and its homology to a gene disrupted in the neurodegenerative disease state Dentatorubral-pallidoluysian atrophy indicates that this gene may be useful in the treatment and/or detection of other neurodegenerative disease states and behavioral disorders such as Alzheimer's Disease, Parkinson's Disease, Huntington's Disease, schizophrenia, mania, dementia, paranoia, obsessive compulsive disorder and panic disorder. Alternatively, the abundance of this gene in fetal lung would suggest that misregulation of the expression of this protein product in the adult could lead to lymphoma or sarcoma formation, particularly in the lung; that it may also be involved in predisposition to certain pulmonary defects such as pulmonary edema and embolism, bronchitis and cystic fibrosis; and thus the gene or the gene product encoded by the gene could be used in the detection and/or treatment of these pulmonary disorders. Protein, as well as, antibodies directed against the protein may show utility as a tumor marker and/or immunotherapy targets for the above listed tissues.

[0463] Many polynucleotide sequences, such as EST sequences, are publicly available and accessible through sequence databases. Some of these sequences are related to SEQ ID NO:68 and may have been publicly available prior to conception of the present invention. Preferably, such related polynucleotides are specifically excluded from the scope of the present invention. To list every related sequence is cumbersome. Accordingly, preferably excluded from the present invention are one or more polynucleotides comprising a nucleotide sequence described by the general formula of a-b, where a is any integer between 1 to 2469 of SEQ ID NO:68, b is an integer of 15 to 2483, where both a and b correspond to the positions of nucleotide residues shown in SEQ ID NO:68, and where b is greater than or equal to a+14.

[0464] Features of Protein Encoded by Gene No: 59

[0465] In specific embodiments, polypeptides of the invention comprise, or alternatively consists of, the following amino acid sequence: RNGALLDKNFFNANSHFPVKGERIRRR (SEQ ID NO:698). Moreover, fragments and variants of this polypeptide (such as, for example, fragments as described herein, polypeptides at least 80%, 85%, 90%, 95%, 96%, 97%, 98%, or 99% identical to these polypeptides and polypeptides encoded by the polynucleotide which hybridize, under stringent conditions, to the polynucleotide encoding this polypeptide are encompassed by the invention. Antibodies that bind polypeptides of the invention are also encompassed by the invention. Polynucleotides encoding this polypeptide are also encompassed by the invention.

[0466] This gene is expressed primarily in the developing embryo.

[0467] Polynucleotides and polypeptides of the invention are useful as reagents for differential identification of the tissue(s) or cell type(s) present in a biological sample and for diagnosis of diseases and conditions which include, but are not limited to, developmental abnormalities. Similarly, polypeptides and antibodies directed to these polypeptides are useful in providing immunological probes for differential identification of the tissue(s) or cell type(s). For a number of disorders of the above tissues or cells, particularly of the developmental system, expression of this gene at significantly higher or lower levels may be routinely detected in certain tissues or cell types (e.g., developing, proliferating, and cancerous and wounded tissues) or bodily fluids (e.g., lymph, amniotic fluid, serum, plasma, urine, synovial fluid and spinal fluid) or another tissue or cell sample taken from an individual having such a disorder, relative to the standard gene expression level, i.e., the expression level in healthy tissue or bodily fluid from an individual not having the disorder.

[0468] The tissue distribution of this gene primarily in the embryo indicates the gene plays a key role in embryo development, and that the gene or the protein encoded by the gene could be used in the treatment and or detection of developmental defects in the embryo or in infants. Similarly, the relatively specific expression of this gene product during embryogenesis indicates that it may be a key player in the proliferation, maintenance, and/or differentiation of various cell types during development. It may also act as a morphogen to control cell and tissue type specification. Because of potential roles in proliferation and differentiation, this gene product may have applications in the adult for tissue regeneration and the treatment of cancers. Expression within embryonic tissue and other cellular sources marked by proliferating cells indicates that this protein may play a role in the regulation of cellular division, and may show utility in the diagnosis and treatment of cancer and other proliferative disorders. Similarly, developmental tissues rely on decisions involving cell differentiation and/or apoptosis in pattern formation. Thus, this protein may also be involved in apoptosis or tissue differentiation and could again be useful in cancer therapy. Protein, as well as, antibodies directed against the protein may show utility as a tumor marker and/or immunotherapy targets for the above listed tissues.

[0469] Many polynucleotide sequences, such as EST sequences, are publicly available and accessible through sequence databases. Some of these sequences are related to SEQ ID NO:69 and may have been publicly available prior to conception of the present invention. Preferably, such related polynucleotides are specifically excluded from the scope of the present invention. To list every related sequence is cumbersome. Accordingly, preferably excluded from the present invention are one or more polynucleotides comprising a nucleotide sequence described by the general formula of a-b, where a is any integer between 1 to 522 of SEQ ID NO:69, b is an integer of 15 to 536, where both a and b correspond to the positions of nucleotide residues shown in SEQ ID NO:69, and where b is greater than or equal to a+14.

[0470] Features of Protein Encoded by Gene No: 60

[0471] This gene displays homology to nestin, an intermediate filament protein, the expression of which correlates with the proliferation of central nervous system progenitor cells and is useful in the identification of brain tumors.

[0472] In specific embodiments, polypeptides of the invention comprise, or alternatively consists of, an amino acid sequence selected from the group: RGSGFGWTSFPRPLPTELTCPGFHRERAFPPDGRVRVRGWGIRRGCRAVWG VGACGCSPGSSWRGSAHRASGPADLPVACRXEGGADSPSLLPSPP (SEQ ID NO:699), AVWGVGACGCSPGSSWRGSAHRA (SEQ ID NO:700), YRP TMEKMKQVVTQTRWMRPDAKRANRRHRRISGKIFAWNPLPKTRFSRLLKAV SENTKRPEPSRPPWMVSHSVEAS (SEQ ID NO:701), and/or FAWNPLPKTRFSRLLKAVSENTKRPEP (SEQ ID NO:702). Moreover, fragments and variants of these polypeptides (such as, for example, fragments as described herein, polypeptides at least 80%, 85%, 90%, 95%, 96%, 97%, 98%, or 99% identical to these polypeptides and polypeptides encoded by the polynucleotide which hybridizes, under stringent conditions, to the polynucleotide encoding these polypeptides) are encompassed by the invention. Antibodies that bind polypeptides of the invention are also encompassed by the invention. Polynucleotides encoding these polypeptides are also encompassed by the invention.

[0473] The gene encoding the disclosed cDNA is believed to reside on chromosome 1. Accordingly, polynucleotides related to this invention are useful as a marker in linkage analysis for chromosome 1.

[0474] This gene is expressed primarily in kidney, and to a lesser extent, in brain.

[0475] Polynucleotides and polypeptides of the invention are useful as reagents for differential identification of the tissue(s) or cell type(s) present in a biological sample and for diagnosis of diseases and conditions which include, but are not limited to, renal disorders and neurodegenerative conditions. Similarly, polypeptides and antibodies directed to these polypeptides are useful in providing immunological probes for differential identification of the tissue(s) or cell type(s). For a number of disorders of the above tissues or cells, particularly of the excretory and nervous systems, expression of this gene at significantly higher or lower levels may be routinely detected in certain tissues or cell types (e.g., neural, urogenital, renal, and cancerous and wounded tissues) or bodily fluids (e.g., lymph, serum, plasma, urine, synovial fluid and spinal fluid) or another tissue or cell sample taken from an individual having such a disorder, relative to the standard gene expression level, i.e., the expression level in healthy tissue or bodily fluid from an individual not having the disorder.

[0476] Predicted epitopes include those comprising a sequence shown in SEQ ID NO:308 as residues: Thr-130 to Asn-137.

[0477] The tissue distribution in brain and kidney, combined with the homology to the conserved nestin protein, indicates that the protein product of this gene is useful for the detection and/or treatment of neurodegenerative disease states and behavioral disorders such as Alzheimer's Disease, Parkinson's Disease, Huntington's Disease, schizophrenia, mania, dementia, paranoia, obsessive compulsive disorder and panic disorder. In addition, its abundance in kidney indicates that it is useful in the treatment and detection of acute renal failure and other disease states associated with the kidney, such as nephritus, renal tubular acidosis, proteinuria, pyuria, edema, pyelonephritis, hydronephritis, nephrotic syndrome, crush syndrome, glomerulonephritis, hematuria, renal colic and kidney stones, in addition to Wilms Tumor Disease, and congenital kidney abnormalities such as horseshoe kidney, polycystic kidney, and Falconi's syndrome. Protein, as well as, antibodies directed against the protein may show utility as a tumor marker and/or immunotherapy targets for the above listed tissues.

[0478] Many polynucleotide sequences, such as EST sequences, are publicly available and accessible through sequence databases. Some of these sequences are related to SEQ ID NO:70 and may have been publicly available prior to conception of the present invention. Preferably, such related polynucleotides are specifically excluded from the scope of the present invention. To list every related sequence is cumbersome. Accordingly, preferably excluded from the present invention are one or more polynucleotides comprising a nucleotide sequence described by the general formula of a-b, where a is any integer between 1 to 560 of SEQ ID NO:70, b is an integer of 15 to 574, where both a and b correspond to the positions of nucleotide residues shown in SEQ ID NO:70, and where b is greater than or equal to a+14.

[0479] Features of Protein Encoded by Gene No: 61

[0480] This gene shares homology with the latrophilin-related protein 1 precursor as well as the calcium-independent alpha-latrotoxin receptor. alpha-Latrotoxin, a black widow spider neurotoxin, can bind to high affinity receptors on the presynaptic plasma membrane and stimulate massive neurotransmitter release in the absence of Ca2+. Neurexins, previously isolated as alpha-latrotoxin receptors, require Ca2+ for their interaction with the toxin and, thus, may not participate in the Ca2+-independent alpha-latrotoxin activity. However, latrophilin binds alpha-Latrotoxin with high affinity in the presence of various divalent cations (Ca2+, Mg2+, Ba2+, and Sr2+) as well as in EDTA. This presumably membrane-bound protein is localized to and differentially distributed among neuronal tissues, with about four times more latrophilin expressed in the cerebral cortex than in the cerebellum; subcellular fractionation showed that the protein is highly enriched in synaptosomal plasma membranes.

[0481] In specific embodiments, polypeptides of the invention comprise, or alternatively consists of, an amino acid sequence selected from the group: IYKVFRHTAGLKPEVSCFENIRSCARXXXXXXXXWIFGVLHVVHASV VTAYLFTVSNAFQGMFIFLFLCVLSRKIQEEYYRLFKNVPCC (SEQ ID NO:703), WIFGVLHVVHASVVTAYLFTVSNAFQGMFIFLFLCVLSRKIQEEYYRLFKNVP CC (SEQ ID NO:704), IYKVFRHTAGLKPEVSCFENIRSCAR (SEQ ID NO:705), IIYKVFRHTAGLKPEVSCFENIRSCARGALALLFLLGTTWIFGVLHVVHASVV TAYLFTVSNAFQG (SEQ ID NO:706), and/or EVSCFENIRSCARGALALLFLLGTTWIFGVLH (SEQ ID NO:707). Moreover, fragments and variants of these polypeptides (such as, for example, fragments as described herein, polypeptides at least 80%, 85%, 90%, 95%, 96%, 97%, 98%, or 99% identical to these polypeptides and polypeptides encoded by the polynucleotide which hybridizes, under stringent conditions, to the polynucleotide encoding these polypeptides) are encompassed by the invention. Antibodies that bind polypeptides of the invention are also encompassed by the invention. Polynucleotides encoding these polypeptides are also encompassed by the invention.

[0482] The translation product of this gene also shares sequence homology with CD 97, a seven transmembrane bound receptor (see Genbank Accession No. 2213659). The gene encoding the disclosed cDNA is believed to reside on chromosome 1. Accordingly, polynucleotides related to this invention are useful as a marker in linkage analysis for chromosome 1.

[0483] This gene is expressed primarily in infant brain and in endothelial cells.

[0484] Polynucleotides and polypeptides of the invention are useful as reagents for differential identification of the tissue(s) or cell type(s) present in a biological sample and for diagnosis of diseases and conditions which include, but are not limited to, neurological, vascular, and hematopoietic disorders. Similarly, polypeptides and antibodies directed to these polypeptides are useful in providing immunological probes for differential identification of the tissue(s) or cell type(s). For a number of disorders of the above tissues or cells, particularly of the neurological and hematopoietic systems, expression of this gene at significantly higher or lower levels may be routinely detected in certain tissues or cell types (e.g., vascular, neural, hematopoietic, and cancerous and wounded tissues) or bodily fluids (e.g., lymph, serum, plasma, urine, synovial fluid and spinal fluid) or another tissue or cell sample taken from an individual having such a disorder, relative to the standard gene expression level, i.e., the expression level in healthy tissue or bodily fluid from an individual not having the disorder.

[0485] Predicted epitopes include those comprising a sequence shown in SEQ ID NO:309 as residues: Lys-13 to Leu-21.

[0486] The tissue distribution in infant brain genes suggest that the protein product may be useful in the detection and/or treatment of neurodegenerative disease states and behavioral disorders such as Alzheimer's Disease, Parkinson's Disease, Huntington's Disease, schizophrenia, mania, dementia, paranoia, obsessive compulsive disorder and panic disorder, while its expression in hematopoietic cell types indicates that the gene could be important for the treatment or detection of immune or hematopoietic disorders including arthritis, asthma and immunodeficiency diseases. Moreover, the expression within endothelial tissue indicates that the protein product of this gene may show utility in the treatment and/or prevention of a variety of vascular disorders, which include, but are not limited to microvascular disease, atherosclerosis, stroke, embolism, and aneurysm. Furthermore, expression within infant tissue indicates that this protein may play a role in the regulation of cellular division, and may show utility in the diagnosis and treatment of cancer and other proliferative disorders. Similarly, developmental tissues rely on decisions involving cell differentiation and/or apoptosis in pattern formation. Thus, this protein may also be involved in apoptosis or tissue differentiation and could again be useful in cancer therapy. Protein, as well as, antibodies directed against the protein may show utility as a tumor marker and/or immunotherapy targets for the above listed tissues.

[0487] Many polynucleotide sequences, such as EST sequences, are publicly available and accessible through sequence databases. Some of these sequences are related to SEQ ID NO:71 and may have been publicly available prior to conception of the present invention. Preferably, such related polynucleotides are specifically excluded from the scope of the present invention. To list every related sequence is cumbersome. Accordingly, preferably excluded from the present invention are one or more polynucleotides comprising a nucleotide sequence described by the general formula of a-b, where a is any integer between 1 to 918 of SEQ ID NO:71, b is an integer of 15 to 932, where both a and b correspond to the positions of nucleotide residues shown in SEQ ID NO:71, and where b is greater than or equal to a+14.

[0488] Features of Protein Encoded by Gene No: 62

[0489] In a specific embodiment, polypeptides of the invention, comprise or alternatively consist of, one or more of the following amino acid sequences: TTILRTCTIVCFYYWFNGVMVLLFFLDRNLLTFNQASIMPFSNTDFLHCLSFK KKLMLLRYIFYVVLTGPTLSLKGDENQIKNLFT (SEQ ID NO:708), IVCFYYWFNGVMVLLFFLDRNLL (SEQ ID NO:709), and/or LLRYIFYVVLTGPTLSLKGDENQI (SEQ ID NO:710). Polynucleotides encoding these polypeptides are also encompassed by the invention as are antibodies that bind one or more of these polypeptides. Moreover, fragments and variants of these polypeptides (such as, for example, fragments as described herein, polypeptides at least 80%, 85%, 90%, 95%, 96%, 97%, 98%, or 99% identical to these polypeptides and polypeptides encoded by the polynucleotide which hybridizes, under stringent conditions, to the polynucleotide encoding these polypeptides, or the complement there of are encompassed by the invention. Antibodies that bind polypeptides of the invention are also encompassed by the invention. Polynucleotides encoding these polypeptides are also encompassed by the invention.

[0490] Also preferred are polypeptides, comprising or alternatively consisting of, the mature polypeptide which is predicted to consist of residues: PTCYSRMRALSQEITRDFNLLQVSEPSEPCVRYLPRLYLDIHNYCVLDKLRDF VASPPCWKVAQVDSLKDKARKLYTIMNSFCRRDLVFLLDDCNALEYPIPVTT VLPDRQR (SEQ ID NO:1245) of the foregoing sequence (SEQ ID NO:310), and biologically active fragments of the mature polypeptide (e g., fragments that induce hematopoiesis). Polynucleotides encoding these polypeptides are also encompassed by the invention. Moreover, fragments and variants of these polypeptides (such as, for example, fragments as described herein, polypeptides at least 80%, 85%, 90%, 95%, 96%, 97%, 98%, or 99% identical to these polypeptides and polypeptides encoded by the polynucleotide which hybridizes, under stringent conditions, to the polynucleotide encoding these polypeptides, or the complement there of are encompassed by the invention. Antibodies that bind polypeptides of the invention are also encompassed by the invention. Polynucleotides encoding these polypeptides are also encompassed by the invention.

[0491] FIGS. 5A-5B show the nucleotide (SEQ ID NO:72) and deduced amino acid sequence (SEQ ID NO:310) corresponding to this gene.

[0492] FIG. 6 shows an analysis of the amino acid sequence (SEQ ID NO:310). Alpha, beta, turn and coil regions; hydrophilicity and hydrophobicity; amphipathic regions; flexible regions; antigenic index and surface probability are shown, and all were generated using the default settings of the recited computer algorithms. In the “Antigenic Index or Jameson-Wolf” graph, the positive peaks indicate locations of the highly antigenic regions of the protein, i.e., regions from which epitope-bearing peptides of the invention can be obtained. Polypeptides comprising, or alternatively consisting of, domains defined by these graphs are contemplated by the present invention, as are polynucleotides encoding these polypeptides.

[0493] The data presented in FIG. 6 are also represented in tabular form in Table 5. The columns are labeled with the headings “Res”, “Position”, and Roman Numerals I-XIV. The column headings refer to the following features of the amino acid sequence presented in FIG. 6, and Table 5: “Res”: amino acid residue of SEQ ID NO:310 and FIGS. 5A-5B; “Position”: position of the corresponding residue within SEQ ID NO:310 and FIGS. 5A-5B; I: Alpha, Regions—Garnier-Robson; II: Alpha, Regions—Chou-Fasman; XIIIi: Beta, Regions—Garnier-Robson; IV: Beta, Regions—Chou-Fasman; V: Turn, Regions—Garnier-Robson; VI: Turn, Regions—Chou-Fasman; VII: Coil, Regions—Garnier-Robson; VIII: Hydrophilicity Plot—Kyte-Doolittle; IX: Hydrophobicity Plot—Hopp-Woods; X: Alpha, Amphipathic Regions—Eisenberg; XI: Beta, Amphipathic Regions—Eisenberg; XII: Flexible Regions—Karplus-Schulz; XIII: Antigenic Index—Jameson-Wolf; and XIV: Surface Probability Plot—Emini.

[0494] Preferred embodiments of the invention in this regard include fragments that comprise, or alternatively consisting of, one or more of the following regions: alpha-helix and alpha-helix forming regions (“alpha-regions”), beta-sheet and beta-sheet forming regions (“beta-regions”), turn and turn-forming regions (“turn-regions”), coil and coil-forming regions (“coil-regions”), hydrophilic regions, hydrophobic regions, alpha amphipathic regions, beta amphipathic regions, flexible regions, surface-forming regions and high antigenic index regions. The data representing the structural or functional attributes of the protein set forth in FIGS. 5A-5B and/or Table 5, as described above, was generated using the various modules and algorithms of the DNA*STAR set on default parameters. In a preferred embodiment, the data presented in columns VII, IX, XIII, and XIV of Table 5 can be used to determine regions of the protein which exhibit a high degree of potential for antigenicity. Regions of high antigenicity are determined from the data presented in columns VIII, IX, XIII, and/or XIV by choosing values which represent regions of the polypeptide which are likely to be exposed on the surface of the polypeptide in an environment in which antigen recognition may occur in the process of initiation of an immune response.

[0495] Certain preferred regions in these regards are set out in FIGS. 5A-5B, but may, as shown in Table 5, be represented or identified by using tabular representations of the data presented in FIG. 6 The DNA*STAR computer algorithm used to generate FIG. 6 set on the original default parameters) was used to present the data in FIG. 6 in a tabular format (See Table 5). The tabular format of the data in FIG. 6 is used to easily determine specific boundaries of a preferred region.

[0496] The present invention is further directed to fragments of the polynucleotide sequences described herein. By a fragment of, for example, the polynucleotide sequence of a deposited cDNA or the nucleotide sequence shown in SEQ ID NO:72, is intended polynucleotide fragments at least about 15 nt, and more preferably at least about 20 nt, at least about 25 nt, still more preferably at least about 30 nt, at least about 35 nt, and even more preferably, at least about 40 nt in length, at least about 45 nt in length, at least about 50 nt in length, at least about 60 nt in length, at least about 70 nt in length, at least about 80 nt in length, at least about 90 nt in length, at least about 100 nt in length, at least about 125 nt in length, at least about 150 nt in length, at least about 175 nt in length, which are useful as diagnostic probes and primers as discussed herein. Of course, larger fragments 200-500 nt in length are also useful according to the present invention, as are fragments corresponding to most, if not all, of the nucleotide sequence of a deposited cDNA or as shown in SEQ ID NO:72. By a fragment at least 20 nt in length, for example, is intended fragments which include 20 or more contiguous bases from the nucleotide sequence of a deposited cDNA or the nucleotide sequence as shown in SEQ ID NO:72. In this context “about” includes the particularly recited size, an sizes larger or smaller by several (5, 4, 3, 2, or 1) nucleotides, at either terminus or at both termini. Representative examples of polynucleotide fragments of the invention include, for example, fragments that comprise, or alternatively, consist of, a sequence from about nucleotide 1 to about 50, from about 51 to about 100, from about 101 to about 150, from about 151 to about 200, from about 201 to about 250, from about 251 to about 300, from about 301 to about 350, from about 351 to about 400, from about 401 to about 450, from about 451 to about 500, and from about 501 to about 550, and from about 551 to about 600, from about 601 to about 650, from about 651 to about 700, from about 701 to about 750, from about 751 to about 800, from about 801 to about 850, from about 851 to about 900, from about 901 to about 950, or from about 951 to about 985 of SEQ ID NO:72, or the complementary strand thereto, or the cDNA contained in a deposited clone. In this context “about” includes the particularly recited ranges, and ranges larger or smaller by several (5, 4, 3, 2, or 1) nucleotides, at either terminus or at both termini. In additional embodiments, the polynucleotides of the invention encode functional attributes of the corresponding protein. Preferred polypeptide fragments of the invention comprise, or alternatively consist of, the secreted protein having a continuous series of deleted residues from the amino or the carboxyl terminus, or both. Particularly, N-terminal deletions of the polypeptide can be described by the general formula m-136 where m is an integer from 2 to 136, where m corresponds to the position of the amino acid residue identified in SEQ ID NO:310. More in particular, the invention provides polynucleotides encoding polypeptides comprising, or alternatively consisting of, an amino acid sequence selected from the group: R-2 to R-136; T-3 to R-136; P-4 to R-136; G-5 to R-136; P-6 to R-136; L-7 to R-136; P-8 to R-136; V-9 to R-136; L-10 to R-136; L-11 to R-136; L-12 to R-136; L-13 to R-136; L-14 to R-136; A-15 to R-136; G-16 to R-136; A-17 to R-136; P-18 to R-136; A-19 to R-136; A-20 to R-136; R-21 to R-136; P-22 to R-136; T-23 to R-136; P-24 to R-136; P-25 to R-136; T-26 to R-136; C-27 to R-136; Y-28 to R-136; S-29 to R-136; R-30 to R-136; M-31 to R-136; R-32 to R-136; A-33 to R-136; L-34 to R-136; S-35 to R-136; Q-36 to R-136; E-37 to R-136; I-38 to R-136; T-39 to R-136; R-40 to R-136; D-41 to R-136; F-42 to R-136; N-43 to R-136; L-44 to R-136; L-45 to R-136; Q-46 to R-136; V-47 to R-136; S-48 to R-0.136; E-49 to R-136; P-50 to R-136; S-51 to R-136; E-52 to R-136; P-53 to R-136; C-54 to R-136; V-55 to R-136; R-56 to R-136; Y-57 to R-136; L-58 to R-136; P-59 to R-136; R-60 to R-136; L-61 to R-136; Y-62 to R-136; L-63 to R-136; D-64 to R-136; I-65 to R-136; H-66 to R-136; N-67 to R-136; Y-68 to R-136; C-69 to R-136; V-70 to R-136; L-71 to R-136; D-72 to R-136; K-73 to R-136; L-74 to R-136; R-75 to R-136; D-76 to R-136; F-77 to R-136; V-78 to R-136; A-79 to R-136; S-80 to R-136; P-81 to R-136; P-82 to R-136; C-83 to R-136; W-84 to R-136; K-85 to R-136; V-86 to R-136; A-87 to R-136; Q-88 to R-136; V-89 to R-136; D-90 to R-136; S-91 to R-136; L-92 to R-136; K-93 to R-136; D-94 to R-136; K-95 to R-136; A-96 to R-136; R-97 to R-136; K-98 to R-136; L-99 to R-136; Y-100 to R-136; T-101 to R-136; I-102 to R-136; M-103 to R-136; N-104 to R-136; S-105 to R-136; F-106 to R-136; C-107 to R-136; R-108 to R-136; R-109 to R-136; D-110 to R-136; L-111 to R-136; V-112 to R-136; F-113 to R-136; L-114 to R-136; L-115 to R-136; D-116 to R-136; D-117 to R-136; C-118 to R-136; N-119 to R-136; A-120 to R-136; L-121 to R-136; E-122 to R-136; Y-123 to R-136; P-124 to R-136; I-125 to R-136; P-126 to R-136; V-127 to R-136; T-128 to R-136; T-129 to R-136; V-130 to R-136; and L-131 to R-136 of SEQ ID NO:310. Polypeptides encoded by these polynucleotides are also encompassed by the invention. Moreover, fragments and variants of these polypeptides (such as, for example, fragments as described herein, polypeptides at least 80%, 85%, 90%, 95%, 96%, 97%, 98%, or 99% identical to these polypeptides and polypeptides encoded by the polynucleotide which hybridizes, under stringent conditions, to the polynucleotide encoding these polypeptides, or the complement there of are encompassed by the invention. Antibodies that bind polypeptides of the invention are also encompassed by the invention. Polynucleotides encoding these polypeptides are also encompassed by the invention.

[0497] Also as mentioned above, even if deletion of one or more amino acids from the C-terminus of a protein results in modification or loss of one or more biological functions of the protein (e.g., ability to induce hematopoiesis), other functional activities (e.g., biological activities, ability to multimerize, ability to bind receptors, ability to activate receptors, ability to bind and block receptor activation, ability to inhibit receptor activation without binding (e.g., as a dominant negative inhibitor of oligomeric complexes), ability to generate antibodies, ability to bind antibodies) may still be retained. For example the ability of the shortened polypeptide to induce and/or bind to antibodies which recognize the complete or mature forms of the polypeptide generally will be retained when less than the majority of the residues of the complete or mature polypeptide are removed from the C-terminus. Whether a particular polypeptide lacking C-terminal residues of a complete polypeptide retains such immunologic activities can readily be determined by routine methods described herein and otherwise known in the art. It is not unlikely that a polypeptide with a large number of deleted C-terminal amino acid residues may retain some biological or immunogenic activities. In fact, peptides composed of as few as six amino acid residues may often evoke an immune response.

[0498] Accordingly, the present invention further provides polypeptides having one or more residues deleted from the carboxyl terminus of the amino acid sequence of the polypeptide shown in FIGS. 5A-5B (SEQ ID NO:310), as described by the general formula 1-n, where n is an integer from 6 to 135, where n corresponds to the position of the amino acid residue identified in SEQ ID NO:310. More in particular, the invention provides polynucleotides encoding polypeptides comprising, or alternatively consisting of, an amino acid sequence selected from the group: M-1 to Q-135; M-1 to R-134; M-1 to D-133; M-1 to P-132; M-1 to L-131; M-1 to V-130; M-1 to T-129; M-1 to T-128; M-1 to V-127; M-1 to P-126; M-1 to I-125; M-1 to P-124; M-1 to Y-123; M-1 to E-122; M-1 to L-121; M-1 to A-120; M-1 to N-119; M-1 to C-118; M-1 to D-117; M-1 to D-116; M-1 to L-115; M-1 to L-114; M-1 to F-113; M-1 to V-112; M-1 to L-11; M-1 to D-110; M-1 to R-109; M-1 to R-108; M-1 to C-107; M-1 to F-106; M-1 to S-105; M-1 to N-104; M-1 to M-103; M-1 to I-102; M-1 to T-101; M-1 to Y-100; M-1 to L-99; M-1 to K-98; M-1 to R-97; M-1 to A-96; M-1 to K-95; M-1 to D-94; M-1 to K-93; M-1 to L-92; M-1 to S-91; M-1 to D-90; M-1 to V-89; M-1 to Q-88; M-1 to A-87; M-1 to V-86; M-1 to K-85; M-1 to W-84; M-1 to C-83; M-1 to P-82; M-1 to P-81; M-1 to S-80; M-1 to A-79; M-1 to V-78; M-1 to F-77; M-1 to D-76; M-1 to R-75; M-1 to L-74; M-1 to K-73; M-1 to D-72; M-1 to L-71; M-1 to V-70; M-1 to C-69; M-1 to Y-68; M-1 to N-67; M-1 to H-66; M-1 to I-65; M-1 to D-64; M-1 to L-63; M-1 to Y-62; M-1 to L-61; M-1 to R-60; M-1 to P-59; M-1 to L-58; M-1 to Y-57; M-1 to R-56; M-1 to V-55; M-1 to C-54; M-1 to P-53; M-1 to E-52; M-1 to S-51; M-1 to P-50; M-1 to E-49; M-1 to S-48; M-1 to V-47; M-1 to Q-46; M-1 to L-45; M-1 to L-44; M-1 to N-43; M-1 to F-42; M-1 to D-41; M-1 to R-40; M-1 to T-39; M-1 to I-38; M-1 to E-37; M-1 to Q-36; M-1 to S-35; M-1 to L-34; M-1 to A-33; M-1 to R-32; M-1 to M-31; M-1 to R-30; M-1 to S-29; M-1 to Y-28; M-1 to C-27; M-1 to T-26; M-1 to P-25; M-1 to P-24; M-1 to T-23; M-1 to P-22; M-1 to R-21; M-1 to A-20; M-1 to A-19; M-1 to P-18; M-1 to A-17; M-1 to G-16; M-1 to A-15; M-1 to L-14; M-1 to L-13; M-1 to L-12; M-1 to L-11; M-1 to L-10; M-1 to V-9; M-1 to P-8; and M-1 to L-7 of SEQ ID NO:310. Polypeptides encoded by these polynucleotides are also encompassed by the invention. Moreover, fragments and variants of these polypeptides (such as, for example, fragments as described herein, polypeptides at least 80%, 85%, 90%, 95%, 96%, 97%, 98%, or 99% identical to these polypeptides and polypeptides encoded by the polynucleotide which hybridizes, under stringent conditions, to the polynucleotide encoding these polypeptides, or the complement there of are encompassed by the invention. Antibodies that bind polypeptides of the invention are also encompassed by the invention. Polynucleotides encoding these polypeptides are also encompassed by the invention.

[0499] In addition, any of the above listed N- or C-terminal deletions can be combined to produce a N- and C-terminal deleted polypeptide. The invention also provides polypeptides comprising, or alternatively consisting of, one or more amino acids deleted from both the amino and the carboxyl termini, which may be described generally as having residues m-n of SEQ ID NO:310, where n and m are integers as described above. More in particular, the invention provides polynucleotides encoding polypeptides comprising, or alternatively consisting of, an amino acid sequence selected from the group: M-1 to A-15; R-2 to G-16; T-3 to A-17; P-4 to P-18; G-5 to A-19; P-6 to A-20; L-7 to R-21; P-8 to P-22; V-9 to T-23; L-10 to P-24; L-11 to P-25; L-12 to T-26; L-13 to C-27; L-14 to Y-28; A-15 to S-29; G-16 to R-30; A-17 to M-31; P-18 to R-32; A-19 to A-33; A-20 to L-34; R-21 to S-35; P-22 to Q-36; T-23 to E-37; P-24 to I-38; P-25 to T-39; T-26 to R-40; C-27 to D-41; Y-28 to F-42; S-29 to N-43; R-30 to L-44; M-31 to L-45; R-32 to Q-46; A-33 to V-47; L-34 to S-48; S-35 to E-49; Q-36 to P-50; E-37 to S-51; I-38 to E-52; T-39 to P-53; R-40 to C-54; D-41 to V-55; F-42 to R-56; N-43 to Y-57; L-44 to L-58; L-45 to P-59; Q-46 to R-60; V-47 to L-61; S-48 to Y-62; E-49 to L-63; P-50 to D-64; S-51 to I-65; E-52 to H-66; P-53 to N-67; C-54 to Y-68; V-55 to C-69; R-56 to V-70; Y-57 to L-71; L-58 to D-72; P-59 to K-73; R-60 to L-74; L-61 to R-75; Y-62 to D-76; L-63 to F-77; D-64 to V-78; I-65 to A-79; H-66 to S-80; N-67 to P-81; Y-68 to P-82; C-69 to C-83; V-70 to W-84; L-71 to K-85; D-72 to V-86; K-73 to A-87; L-74 to Q-88; R-75 to V-89; D-76 to D-90; F-77 to S-91; V-78 to L-92; A-79 to K-93; S-80 to D-94; P-81 to K-95; P-82 to A-96; C-83 to R-97; W-84 to K-98; K-85 to L-99; V-86 to Y-100; A-87 to T-101; Q-88 to I-102; V-89 to M-103; D-90 to N-104; S-91 to S-105; L-92 to F-106; K-93 to C-107; D-94 to R-108; K-95 to R-109; A-96 to D-110; R-97 to L-111; K-98 to V-112; L-99 to F-113; Y-100 to L-114; T-101 to L-115; I-102 to D-116; M-103 to D-117; N-104 to C-118; S-105 to N-119; F-106 to A-120; C-107 to L-121; R-108 to E-122; R-109 to Y-123; D-110 to P-124; L-111 to I-125; V-112 to P-126; F-113 to V-127; L-114 to T-128; L-115 to T-129; D-116 to V-130; D-117 to L-131; C-118 to P-132; N-119 to D-133; A-120 to R-134; L-121 to Q-135; and E-122 to R-136 of SEQ ID NO:310. Polynucleotides encoding these polypeptides are also encompassed by the invention. Moreover, fragments and variants of these polypeptides (such as, for example, fragments as described herein, polypeptides at least 80%, 85%, 90%, 95%, 96%, 97%, 98%, or 99% identical to these polypeptides and polypeptides encoded by the polynucleotide which hybridizes, under stringent conditions, to the polynucleotide encoding these polypeptides, or the complement there of are encompassed by the invention. Antibodies that bind polypeptides of the invention are also encompassed by the invention. Polynucleotides encoding these polypeptides are also encompassed by the invention.

[0500] The present invention is also directed to proteins containing polypeptides at least 80%, 85%, 90%, 92%, 93%, 94%, 95%, 96%, 97%, 98% or 99% identical to a polypeptide sequence set forth herein as m-n. In preferred embodiments, the application is directed to proteins containing polypeptides at least 80%, 85%, 90%, 95%, 96%, 97%, 98% or 99% identical to polypeptides having the amino acid sequence of the specific N- and C-terminal deletions recited herein. Polynucleotides encoding these polypeptides are also encompassed by the invention.

[0501] Also included are polynucleotide sequences encoding a polypeptide consisting of a portion of the complete amino acid sequence encoded by a cDNA clone contained in ATCC Deposit No. 97975 (deposited Apr. 4, 1997) and ATCC Deposit No. 209081 (deposited May 29, 1997), where this portion excludes any integer of amino acid residues from 1 to about 606 (end of protein minus six) amino acids from the amino terminus of the complete amino acid sequence encoded by a cDNA clone contained in ATCC Deposit No. 97975 and 209081, or any integer of amino acid residues from 6 to about 612 amino acids from the carboxyl terminus, or any combination of the above amino terminal and carboxyl terminal deletions, of the complete amino acid sequence encoded by the cDNA clone contained in ATCC Deposit No. 97975 and 209081. Polypeptides encoded by these polynucleotides also are encompassed by the invention. Moreover, fragments and variants of these polypeptides (such as, for example, fragments as described herein, polypeptides at least 80%, 85%, 90%, 95%, 96%, 97%, 98%, or 99% identical to these polypeptides and polypeptides encoded by the polynucleotide which hybridizes, under stringent conditions, to the polynucleotide encoding these polypeptides, or the complement there of are encompassed by the invention. Antibodies that bind polypeptides of the invention are also encompassed by the invention. Polynucleotides encoding these polypeptides are also encompassed by the invention.

[0502] The gene encoding the disclosed cDNA is believed to reside on chromosome 4. Accordingly, polynucleotides related to this invention have uses that include, but are not limited to, serving as probes or primers in chromosome identification, chromosome mapping, and linkage analysis for chromosome 4.

[0503] This gene is expressed primarily in fetal liver and fetal spleen.

[0504] Polynucleotides and polypeptides of the invention are useful as reagents for differential identification of the tissue(s) or cell type(s) present in a biological sample and for diagnosis of diseases and conditions which include, but are not limited to, hematopoietic, immunological, developmental, and/or hepatic disorders. Similarly, polypeptides and antibodies directed to these polypeptides are useful in providing immunological probes for differential identification of the tissue(s) or cell type(s). For a number of disorders of the above tissues or cells, particularly of the immune and hematopoetic systems, expression of this gene at significantly higher or lower levels may be routinely detected in certain tissues or cell types (e.g., hematopoietic, immune, hepatic, developmental, and cancerous and wounded tissues) or bodily fluids (e.g., lymph, amniotic fluid, bile, serum, plasma, urine, synovial fluid and spinal fluid) or another tissue or cell sample taken from an individual having such a disorder, relative to the standard gene expression level, i.e., the expression level in healthy tissue or bodily fluid from an individual not having the disorder. For example, polynucleotides and polypeptides of the invention, polynucleotide and polypeptide fragments, and polynucleotide and polypeptide variants, and antibodies directed to these polypeptides are useful for identifying, selecting, targeting and/or stimulating proliferation of hematopoietic stem cells (a.k.a., hematopoietic progenitor cells).

[0505] Cytokines typically exert their respective biochemical and physiological effects by binding to specific receptor molecules. Receptor binding then stimulates specific signal transduction pathways (Kishimoto, T., et al., Cell 76:253-262 (1994)). The specific interactions of cytokines with their receptors are often the primary regulators of a wide variety of cellular processes including activation, proliferation, and differentiation (Arai, K. —I, et al., Ann. Rev. Biochem. 59:783-836 (1990); Paul, W. E. and Seder, R. A., Cell 76:241-251 (1994)).

[0506] The polynucleotides and polypeptides of this invention may be useful for the diagnosis and treatment of a variety of immune system and hematopoietic disorders, pathologies, and/or deficiencies. For example, this gene and/or gene product may play a role in regulating the proliferation; survival; differentiation; and/or activation of hematopoietic cell lineages, including blood stem cells. Furthermore, polypeptides of this invention may be involved in the regulation of cytokine production, antigen presentation, or other processes useful for treatment of cancer, particularly leukemia (e.g., by boosting immune responses, suppressing hyperproliferative activity, or enhancing recovery of healthy hematopoietic cell populations during or following chemotherapy). Moreover, the polynucleotides and polypeptides of this invention, as well as antibodies against the polypeptides of this invention, may be useful for treating immunological and hematopoietic disorders; such as for examples, arthritis, asthma, immunodeficiency diseases (e.g. AIDS), leukemia, rheumatoid arthritis, granulomatous disease, inflammatory bowel disease, sepsis, acne, neutropenia, neutrophilia, psoriasis, hypersensitivities, such as T-cell mediated cytotoxicity; immune reactions to transplanted organs and tissues, such as host-versus-graft and graft-versus-host diseases, or autoimmunity disorders, demyelination, systemic lupus erythematosis, drug induced hemolytic anemia, rheumatoid arthritis, Sjogren's disease, and scleroderma. Moreover, the polypeptide of this invention represents a secreted factor that is likely to have activity in stimulating the differentiation of blood cells, or recruiting immune and hematopoietic cells to sites of injury. Thus, this polypeptide is thought to be useful in the expansion of stem cells and committed progenitors of various blood lineages, and in the differentiation and/or proliferation of various cell types.

[0507] Preferred polypeptides of the present invention comprise, or alternatively consist of, one or more of the immunogenic epitopes shown in SEQ ID NO:310 as residues: Met-1 to Leu-7, Pro-18 to Cys-27, Ser-29 to Ser-35, Glu-37 to Asp-41, Gln-46 to Cys-54, Asp-72 to Val-78, Pro-81 to Trp-84, Ser-91 to Lys-98, Asn-104 to Leu-111, Asp-116 to Leu-121, and Val-130 to Arg-136. Polynucleotides encoding said polypeptides are also encompassed by the invention. Antibodies that bind said epitopes or other polypeptides of the invention are also encompassed.

[0508] The tissue distribution of this gene in fetal liver and spleen indicates that the gene could be important for the treatment or detection of immune or hematopoietic disorders including arthritis, leukemia, and immunodeficiency diseases. Moreover, the protein product of this gene is useful for the treatment and diagnosis of hematopoetic related disorders such as anemia, pancytopenia, leukopenia, thrombocytopenia or leukemia since stromal cells are important in the production of cells of hematopoietic lineages. The uses include bone marrow cell ex vivo culture, bone marrow transplantation, bone marrow reconstitution, radiotherapy or chemotherapy of neoplasia. The gene product may also be involved in lymphopoiesis, therefore, it can be used in immune disorders such as infection, inflammation, allergy, immunodeficiency etc. In addition, this gene product may have commercial utility in the expansion of stem cells and committed progenitors of various blood lineages, and in the differentiation and/or proliferation of various cell types. Moreover, expression within fetal tissue indicates that this protein may play a role in the regulation of cellular division, and may show utility in the diagnosis and treatment of cancer and other proliferative disorders. Similarly, developmental tissues rely on decisions involving cell differentiation and/or apoptosis in pattern formation. Thus, this protein may also be involved in apoptosis or tissue differentiation and could again be useful in cancer therapy. Protein, as well as, antibodies directed against the protein may show utility as a tumor marker and/or immunotherapy targets for the above listed tissues.

[0509] Many polynucleotide sequences, such as EST sequences, are publicly available and accessible through sequence databases. Some of these sequences are related to SEQ ID NO:72 and may have been publicly available prior to conception of the present invention. Preferably, such related polynucleotides are specifically excluded from the scope of the present invention. To list every related sequence is cumbersome. Accordingly, preferably excluded from the present invention are one or more polynucleotides comprising a nucleotide sequence described by the general formula of a-b, where a is any integer between 1 to 982 of SEQ ID NO:72, b is an integer of 15 to 996, where both a and b correspond to the positions of nucleotide residues shown in SEQ ID NO:72, and where b is greater than or equal to a+14.

[0510] Features of Protein Encoded by Gene No: 63

[0511] This gene shares homology with human serum amyloid protein (See Genbank Accession No. W13671).

[0512] In specific embodiments, polypeptides of the invention comprise, or alternatively consists of, an amino acid sequence selected from the group: ALTRIPPGDWVINVTAVSFAGKTTARFFHSSPPSLGIQARTDPGHQRRD (SEQ ID NO:711), SMLLLFPLQERPQQDSFIRLLAWGTRLELTLDIKGGI (SEQ ID NO:712), TGLWADGFSSHIIPPLMSRVSSSLVPQARRRRMKESCCGLSCKGNSSNIDYPV TGRNSCERAPLCAFALHFQERTXITGXGEDPGPFQSXGRVTASRXTLACSHV AMTPAGCXQALGTPSSYCVRKAPRA (SEQ ID NO:713), and/or QARRRRMKESCCGLSCKGNSSNIDYPVT (SEQ ID NO:714). Moreover, fragments and variants of these polypeptides (such as, for example, fragments as described herein, polypeptides at least 80%, 85%, 90%, 95%, 96%, 97%, 98%, or 99% identical to these polypeptides and polypeptides encoded by the polynucleotide which hybridizes, under stringent conditions, to the polynucleotide encoding these polypeptides) are encompassed by the invention. Antibodies that bind polypeptides of the invention are also encompassed by the invention. Polynucleotides encoding these polypeptides are also encompassed by the invention.

[0513] The gene encoding the disclosed cDNA is believed to reside on chromosome 9. Accordingly, polynucleotides related to this invention are useful as a marker in linkage analysis for chromosome 9.

[0514] This gene is expressed primarily in fetal liver and spleen.

[0515] Polynucleotides and polypeptides of the invention are useful as reagents for differential identification of the tissue(s) or cell type(s) present in a biological sample and for diagnosis of diseases and conditions which include, but are not limited to, hematopoietic, immune, and/or developmental disorders. Similarly, polypeptides and antibodies directed to these polypeptides are useful in providing immunological probes for differential identification of the tissue(s) or cell type(s). For a number of disorders of the above tissues or cells, particularly of the hematopoietic and immune systems, expression of this gene at significantly higher or lower levels may be routinely detected in certain tissues or cell types (e.g., hematopoietic, immune, developmental, and cancerous and wounded tissues) or bodily fluids (e.g., lymph, amniotic fluid, serum, plasma, urine, synovial fluid and spinal fluid) or another tissue or cell sample taken from an individual having such a disorder, relative to the standard gene expression level, i.e., the expression level in healthy tissue or bodily fluid from an individual not having the disorder.

[0516] The tissue distribution of this gene in fetal liver-spleen indicates that the gene is important for the treatment or detection of immune or hematopoietic disorders including arthritis, leukemia, and immunodeficiency diseases. Moreover, the protein product of this gene is useful for the treatment and diagnosis of hematopoetic related disorders such as anemia, pancytopenia, leukopenia, thrombocytopenia or leukemia since stromal cells are important in the production of cells of hematopoietic lineages. The uses include bone marrow cell ex vivo culture, bone marrow transplantation, bone marrow reconstitution, radiotherapy or chemotherapy of neoplasia. The gene product may also be involved in lymphopoiesis, therefore, it can be used in immune disorders such as infection, inflammation, allergy, immunodeficiency, etc. In addition, this gene product may have commercial utility in the expansion of stem cells and committed progenitors of various blood lineages, and in the differentiation and/or proliferation of various cell types. Furthermore, expression within fetal tissue indicates that this protein may play a role in the regulation of cellular division, and may show utility in the diagnosis and treatment of cancer and other proliferative disorders. Similarly, developmental tissues rely on decisions involving cell differentiation and/or apoptosis in pattern formation. Thus, this protein may also be involved in apoptosis or tissue differentiation and could again be useful in cancer therapy. Protein, as well as, antibodies directed against the protein may show utility as a tumor marker and/or immunotherapy targets for the above listed tissues.

[0517] Many polynucleotide sequences, such as EST sequences, are publicly available and accessible through sequence databases. Some of these sequences are related to SEQ ID NO:73 and may have been publicly available prior to conception of the present invention. Preferably, such related polynucleotides are specifically excluded from the scope of the present invention. To list every related sequence is cumbersome. Accordingly, preferably excluded from the present invention are one or more polynucleotides comprising a nucleotide sequence described by the general formula of a-b, where a is any integer between 1 to 771 of SEQ ID NO:73, b is an integer of 15 to 785, where both a and b correspond to the positions of nucleotide residues shown in SEQ ID NO:73, and where b is greater than or equal to a+14.

[0518] Features of Protein Encoded by Gene No: 64

[0519] In specific embodiments, polypeptides of the invention comprise, or alternatively consists of, the following amino acid sequence: LWRSSGVER (SEQ ID NO:715). Moreover, fragments and variants of this polypeptide (such as, for example, fragments as described herein, polypeptides at least 80%, 85%, 90%, 95%, 96%, 97%, 98%, or 99% identical to these polypeptides and polypeptides encoded by the polynucleotide which hybridize, under stringent conditions, to the polynucleotide encoding this polypeptide are encompassed by the invention. Antibodies that bind polypeptides of the invention are also encompassed by the invention. Polynucleotides encoding this polypeptide are also encompassed by the invention.

[0520] The gene encoding the disclosed cDNA is believed to reside on chromosome 3. Accordingly, polynucleotides related to this invention are useful as a marker in linkage analysis for chromosome 3.

[0521] This gene is expressed specifically in the brain.

[0522] Polynucleotides and polypeptides of the invention are useful as reagents for differential identification of the tissue(s) or cell type(s) present in a biological sample and for diagnosis of diseases and conditions which include, but are not limited to, neural disorders, particularly neurodegenerative disease states. Similarly, polypeptides and antibodies directed to these polypeptides are useful in providing immunological probes for differential identification of the tissue(s) or cell type(s). For a number of disorders of the above tissues or cells, particularly of the neurological systems, expression of this gene at significantly higher or lower levels may be routinely detected in certain tissues or cell types (e.g., neural, and cancerous and wounded tissues) or bodily fluids (e.g., lymph, serum, plasma, urine, synovial fluid and spinal fluid) or another tissue or cell sample taken from an individual having such a disorder, relative to the standard gene expression level, i.e., the expression level in healthy tissue or bodily fluid from an individual not having the disorder.

[0523] The tissue distribution in brain indicates that the protein product of this gene is useful for the detection/treatment of neurodegenerative disease states, behavioral disorders, or inflammatory conditions such as Alzheimer's Disease, Parkinson's Disease, Huntington's Disease, Tourette's Syndrome, meningitis, encephalitis, demyelinating diseases, peripheral neuropathies, neoplasia, trauma, congenital malformations, spinal cord injuries, ischemia and infarction, aneurysms, hemorrhages, schizophrenia, mania, dementia, paranoia, obsessive compulsive disorder, panic disorder, learning disabilities, ALS, psychoses, autism, and altered behaviors, including disorders in feeding, sleep patterns, balance, and perception. In addition, elevated expression of this gene product in regions of the brain indicates that it plays a role in normal neural function. Potentially, this gene product is involved in synapse formation, neurotransmission, learning, cognition, homeostasis, or neuronal differentiation or survival. Moreover, the gene or gene product may also play a role in the treatment and/or detection of developmental disorders associated with the developing embryo, sexually-linked disorders, or disorders of the cardiovascular system. Protein, as well as, antibodies directed against the protein may show utility as a tumor marker and/or immunotherapy targets for the above listed tissues.

[0524] Many polynucleotide sequences, such as EST sequences, are publicly available and accessible through sequence databases. Some of these sequences are related to SEQ ID NO:74 and may have been publicly available prior to conception of the present invention. Preferably, such related polynucleotides are specifically excluded from the scope of the present invention. To list every related sequence is cumbersome. Accordingly, preferably excluded from the present invention are one or more polynucleotides comprising a nucleotide sequence described by the general formula of a-b, where a is any integer between 1 to 1055 of SEQ ID NO:74, b is an integer of 15 to 1069, where both a and b correspond to the positions of nucleotide residues shown in SEQ ID NO:74, and where b is greater than or equal to a+14.

[0525] Features of Protein Encoded by Gene No: 65

[0526] This gene shares homology with a yeast protein.

[0527] In specific embodiments, polypeptides of the invention comprise, or alternatively consists of, the following amino acid sequence: LQEVNITLPENSVWYERYKFDIPVFHL (SEQ ID NO:716). Moreover, fragments and variants of this polypeptide (such as, for example, fragments as described herein, polypeptides at least 80%, 85%, 90%, 95%, 96%, 97%, 98%, or 99% identical to these polypeptides and polypeptides encoded by the polynucleotide which hybridize, under stringent conditions, to the polynucleotide encoding this polypeptide are encompassed by the invention. Antibodies that bind polypeptides of the invention are also encompassed by the invention. Polynucleotides encoding this polypeptide are also encompassed by the invention. (See Genbank Accession No. 1332638).

[0528] This gene is expressed primarily in fetal tissue (fetus and fetal liver).

[0529] Polynucleotides and polypeptides of the invention are useful as reagents for differential identification of the tissue(s) or cell type(s) present in a biological sample and for diagnosis of diseases and conditions which include, but are not limited to, hepatic, developmental, immune, and/or hematopoietic disorders, including cancers (e.g. hepatoblastoma). Similarly, polypeptides and antibodies directed to these polypeptides are useful in providing immunological probes for differential identification of the tissue(s) or cell type(s). For a number of disorders of the above tissues or cells, particularly of the hepatic system, expression of this gene at significantly higher or lower levels may be routinely detected in certain tissues or cell types (e.g., hepatic, developmental, immune, hematopoietic, and cancerous and wounded tissues) or bodily fluids (e.g., lymph, amniotic fluid, bile, serum, plasma, urine, synovial fluid and spinal fluid) or another tissue or cell sample taken from an individual having such a disorder, relative to the standard gene expression level, i.e., the expression level in healthy tissue or bodily fluid from an individual not having the disorder.

[0530] Predicted epitopes include those comprising a sequence shown in SEQ ID NO:313 as residues: Asn-72 to Glu-77.

[0531] The tissue distribution in fetal liver indicates that the protein product of this gene is useful for the detection and treatment of liver disorders and cancers (e.g. hepatoblastoma, jaundice, hepatitis, liver metabolic diseases and conditions that are attributable to the differentiation of hepatocyte progenitor cells). In addition the expression in fetus would suggest a useful role for the protein product in developmental abnormalities, fetal deficiencies, pre-natal disorders and various would-healing models and/or tissue trauma. Moreover, the protein product of this gene is useful for the treatment and diagnosis of hematopoetic related disorders such as anemia, pancytopenia, leukopenia, thrombocytopenia or leukemia since stromal cells are important in the production of cells of hematopoietic lineages. The uses include bone marrow cell ex vivo culture, bone marrow transplantation, bone marrow reconstitution, radiotherapy or chemotherapy of neoplasia. The gene product may also be involved in lymphopoiesis, therefore, it can be used in immune disorders such as infection, inflammation, allergy, immunodeficiency etc. In addition, this gene product may have commercial utility in the expansion of stem cells and committed progenitors of various blood lineages, and in the differentiation and/or proliferation of various cell types. Protein, as well as, antibodies directed against the protein may show utility as a tumor marker and/or immunotherapy targets for the above listed tissues.

[0532] Many polynucleotide sequences, such as EST sequences, are publicly available and accessible through sequence databases. Some of these sequences are related to SEQ ID NO:75 and may have been publicly available prior to conception of the present invention. Preferably, such related polynucleotides are specifically excluded from the scope of the present invention. To list every related sequence is cumbersome. Accordingly, preferably excluded from the present invention are one or more polynucleotides comprising a nucleotide sequence described by the general formula of a-b, where a is any integer between 1 to 817 of SEQ ID NO:75, b is an integer of 15 to 831, where both a and b correspond to the positions of nucleotide residues shown in SEQ ID NO:75, and where b is greater than or equal to a+14.

[0533] Features of Protein Encoded by Gene No: 66

[0534] This gene has homology with a B-cell surface antigen which may indicate that this gene plays a role in the immune response, including, but not limited to disorders and infections of the immune system.

[0535] Preferred polynucleotide fragments comprise the following sequence: GTAGCATGTAGCCAGTCGAATAACNTATAAGGACAAAGTGGAGTCCACGC GTGCGCCGTCTAGACTAGTGGATCCCCCGGCTGCAGGATTCGGCACGAG (SEQ ID NO:718). Also preferred are polypeptides comprising polypeptide fragments encoded by these polynucleotide fragments.

[0536] This gene shares homology with an interferon-gamma receptor (See Genbank Accession No.T94535).

[0537] In specific embodiments, polypeptides of the invention comprise, or alternatively consists of, an amino acid sequence selected from the group: MQGSGSQFRACLLCLCFSCPCSPGGPRWNSRQGGRRFPKTCRAISQNLVFKY KTFCPVRYMQPHRSSLCLHFTSYVFELSTWGSLRTYSTDLKKKKKNSRGGPVP IRPKS (SEQ ID NO:717), MQGSGSQFPRACLLCLCFSCPCSPGGPRWNSRQGGRRFPKTCRAISQNLVFK (SEQ ID NO:719), PVRYMQPHRSSLCLHFTSYVFILSTWGSLRTYSTDLKKKKKNSRGGPVPIRPK S (SEQ ID NO:720), [sequence omitted] (SEQ ID NO:721), TSGSPGCRIRHELPGEEQRDCSLGWRGVGMRATHCQAAR (SEQ ID NO:722), EPPIAKQQECSCFFPFQNMQGSGSQFRACLLCLCFSCPCSPGGPRWNSRQGGR RFPKTCRAISQNLVFKYKTFCPVRYMQPHRSSLCLLFTSYVFILSTWGSLRTY STDLKKKKKNSRGGPVPIRPKS (SEQ ID NO:723), and/or QFRACLLCLCFSCPCSPGGPRWNSRQGGRRF (SEQ ID NO:724). Moreover, fragments and variants of these polypeptides (such as, for example, fragments as described herein, polypeptides at least 80%, 85%, 90%, 95%, 96%, 97%, 98%, or 99% identical to these polypeptides and polypeptides encoded by the polynucleotide which hybridizes, under stringent conditions, to the polynucleotide encoding these polypeptides) are encompassed by the invention. Antibodies that bind polypeptides of the invention are also encompassed by the invention. Polynucleotides encoding these polypeptides are also encompassed by the invention.

[0538] This gene is expressed primarily in T-cells and gall bladder.

[0539] Polynucleotides and polypeptides of the invention are useful as reagents for differential identification of the tissue(s) or cell type(s) present in a biological sample and for diagnosis of diseases and conditions which include, but are not limited to, immunological disorders and conditions (immunodeficiencies, cancer, leukemia, hematopoiesis), in addition to metabolic, gastrointestinal, and/or digestive disorders. Similarly, polypeptides and antibodies directed to these polypeptides are useful in providing immunological probes for differential identification of the tissue(s) or cell type(s). For a number of disorders of the above tissues or cells, particularly of the immune and digestive systems, expression of this gene at significantly higher or lower levels may be routinely detected in certain tissues or cell types (e.g., immune, hematopoietic, metabolic, gastrointestinal, digestive, and cancerous and wounded tissues) or bodily fluids (e.g., lymph, serum, bile, plasma, urine, synovial fluid and spinal fluid) or another tissue or cell sample taken from an individual having such a disorder, relative to the standard gene expression level, i.e., the expression level in healthy tissue or bodily fluid from an individual not having the disorder.

[0540] Predicted epitopes include those comprising a sequence shown in SEQ ID NO:314 as residues: Thr-41 to Gly-52.

[0541] The tissue distribution in T-cells indicates that the protein product of this gene is useful for the treatment and diagnosis of immune disorders including: leukemias, lymphomas, auto-immune disorders, immunosuppressive (transplantation) and immunodeficiencies (e.g. AIDS), inflammation and hematopoietic disorders. Moreover, the expression of this gene in gall bladder would suggest a possible role for this gene product in digestive disorders, particularly of the pancreas or liver. Protein, as well as, antibodies directed against the protein may show utility as a tumor marker and/or immunotherapy targets for the above listed tissues.

[0542] Many polynucleotide sequences, such as EST sequences, are publicly available and accessible through sequence databases. Some of these sequences are related to SEQ ID NO:76 and may have been publicly available prior to conception of the present invention. Preferably, such related polynucleotides are specifically excluded from the scope of the present invention. To list every related sequence is cumbersome. Accordingly, preferably excluded from the present invention are one or more polynucleotides comprising a nucleotide sequence described by the general formula of a-b, where a is any integer between 1 to 576 of SEQ ID NO:76, b is an integer of 15 to 590, where both a and b correspond to the positions of nucleotide residues shown in SEQ ID NO:76, and where b is greater than or equal to a+14.

[0543] Features of Protein Encoded by Gene No: 67

[0544] In specific embodiments, polypeptides of the invention comprise, or alternatively consists of, an amino acid sequence selected from the group: NQFTSCILFCDGGHWRELLFQSI (SEQ ID NO:725), AMSSKLLNLLALLQYSVHDHCHPRRLLKRGARATLRHKGWGPSSLRGCESF QIVLIGWGPDLAVGFGRGKLLSRSLPVRHGGVSEFCLPHRDVVRLEKVKK (SEQ ID NO:726), and/or GPSSLRGCESFQIVLIGWGPDLAVGFGRGKLLS (SEQ ID NO:727). Moreover, fragments and variants of these polypeptides (such as, for example, fragments as described herein, polypeptides at least 80%, 85%, 90%, 95%, 96%, 97%, 98%, or 99% identical to these polypeptides and polypeptides encoded by the polynucleotide which hybridizes, under stringent conditions, to the polynucleotide encoding these polypeptides) are encompassed by the invention. Antibodies that bind polypeptides of the invention are also encompassed by the invention. Polynucleotides encoding these polypeptides are also encompassed by the invention.

[0545] The gene encoding the disclosed cDNA is believed to reside on chromosome 11. Accordingly, polynucleotides related to this invention are useful as a marker in linkage analysis for chromosome 11.

[0546] This gene is expressed primarily in a variety of fetal and developmental tissues (e.g. fetal spleen, infant brain).

[0547] Polynucleotides and polypeptides of the invention are useful as reagents for differential identification of the tissue(s) or cell type(s) present in a biological sample and for diagnosis of diseases and conditions which include, but are not limited to, developmental, immune or neurological abnormalities. Similarly, polypeptides and antibodies directed to these polypeptides are useful in providing immunological probes for differential identification of the tissue(s) or cell type(s). For a number of disorders of the above tissues or cells, particularly of the developing immune and central nervous systems, expression of this gene at significantly higher or lower levels may be routinely detected in certain tissues or cell types (e.g., neural, immune, hematopoietic, hepatic, developmental, and cancerous and wounded tissues) or bodily fluids (e.g., lymph, amniotic fluid, bile, serum, plasma, urine, synovial fluid and spinal fluid) or another tissue or cell sample taken from an individual having such a disorder, relative to the standard gene expression level, i.e., the expression level in healthy tissue or bodily fluid from an individual not having the disorder.

[0548] Predicted epitopes include those comprising a sequence shown in SEQ ID NO:315 as residues: Ser-38 to Ser-43.

[0549] The tissue distribution in fetal tissues indicates that the protein product of this gene is useful for developmental abnormalities or fetal deficiencies. The detection in infant brain would suggest a role in neurological disorders, (both developmental and neurodegenerative conditions of the brain and nervous system, behavioral disorders, depression, schizophrenia, Alzheimer's disease, Parkinson's disease, Huntington's disease, mania, dementia). In addition, the detection in spleen would similarly suggest a role in the detection and treatment of immune disorders (e.g. immunodeficiency, inflammation, cancer, wound healing, tissue repair, hematopoiesis). Protein, as well as, antibodies directed against the protein may show utility as a tumor marker and/or immunotherapy targets for the above listed tissues.

[0550] Many polynucleotide sequences, such as EST sequences, are publicly available and accessible through sequence databases. Some of these sequences are related to SEQ ID NO:77 and may have been publicly available prior to conception of the present invention. Preferably, such related polynucleotides are specifically excluded from the scope of the present invention. To list every related sequence is cumbersome. Accordingly, preferably excluded from the present invention are one or more polynucleotides comprising a nucleotide sequence described by the general formula of a-b, where a is any integer between 1 to 1260 of SEQ ID NO:77, b is an integer of 15 to 1274, where both a and b correspond to the positions of nucleotide residues shown in SEQ ID NO:77, and where b is greater than or equal to a+14.

[0551] Features of Protein Encoded by Gene No: 68

[0552] In specific embodiments, polypeptides of the invention comprise, or alternatively consists of, the following amino acid sequence: TRKNIDFXETEKYYLFSFSNNVSFKNFWLKYN (SEQ ID NO:728). Moreover, fragments and variants of this polypeptide (such as, for example, fragments as described herein, polypeptides at least 80%, 85%, 90%, 95%, 96%, 97%, 98%, or 99% identical to these polypeptides and polypeptides encoded by the polynucleotide which hybridize, under stringent conditions, to the polynucleotide encoding this polypeptide are encompassed by the invention. Antibodies that bind polypeptides of the invention are also encompassed by the invention. Polynucleotides encoding this polypeptide are also encompassed by the invention.

[0553] This gene is expressed primarily in spleen, T-cells, and fetal heart.

[0554] Polynucleotides and polypeptides of the invention are useful as reagents for differential identification of the tissue(s) or cell type(s) present in a biological sample and for diagnosis of diseases and conditions which include, but are not limited to, immunological or hematopoietic deficiencies or disorders, including AIDS and cardiovascular or developmental conditions. Similarly, polypeptides and antibodies directed to these polypeptides are useful in providing immunological probes for differential identification of the tissue(s) or cell type(s). For a number of disorders of the above tissues or cells, particularly of the immune and cardiovascular systems, expression of this gene at significantly higher or lower levels may be routinely detected in certain tissues or cell types (e.g., immune, hematopoietic, cardiovascular, developmental, and cancerous and wounded tissues) or bodily fluids (e.g., lymph, amniotic fluid, serum, plasma, urine, synovial fluid and spinal fluid) or another tissue or cell sample taken from an individual having such a disorder, relative to the standard gene expression level, i.e., the expression level in healthy tissue or bodily fluid from an individual not having the disorder.

[0555] The tissue distribution in spleen and T-cells indicates that the protein product of this gene is useful for the diagnosis and treatment of immune disorders including: leukemias, lymphomas, autoimmune disorders, immunodeficiencies (e.g. AIDS), immunosuppressive conditions (transplantation) and hematopoietic disorders. Moreover, the expression in fetal heart indicates that the protein product of this gene is useful for the treatment and diagnosis of cardiovascular disorders (e.g. heart disease, restenosis, atherosclerosis, stoke, angina, thrombosis). Protein, as well as, antibodies directed against the protein may show utility as a tumor marker and/or immunotherapy targets for the above listed tissues.

[0556] Many polynucleotide sequences, such as EST sequences, are publicly available and accessible through sequence databases. Some of these sequences are related to SEQ ID NO:78 and may have been publicly available prior to conception of the present invention. Preferably, such related polynucleotides are specifically excluded from the scope of the present invention. To list every related sequence is cumbersome. Accordingly, preferably excluded from the present invention are one or more polynucleotides comprising a nucleotide sequence described by the general formula of a-b, where a is any integer between 1 to 1119 of SEQ ID NO:78, b is an integer of 15 to 1133, where both a and b correspond to the positions of nucleotide residues shown in SEQ ID NO:78, and where b is greater than or equal to a+14.

[0557] Features of Protein Encoded by Gene No: 69

[0558] This gene shares homology with a human collagen protein.

[0559] In specific embodiments, polypeptides of the invention comprise, or alternatively consists of, an amino acid sequence selected from the group: MPRKTSKCRQLLCSGASRNADTAARQSTCSSHRPPGKIPSLGPRRXPGCXSVP SSRGEQSTGSPAAPRCGRRDAHRGLPGGAAMTPGDTWASFNPRAGHSKSQG EGQESSGASRQDRHPVSHWVERQREAWGAPRSSSAGGVKVAATTEREPEFKI KTGKA (SEQ ID NO:729), CSGASRNADTAARQSTCSSHRPPGKIPSLGPRRXPGCXSVPSSRGEQSTGSPA APRCGRRDAHRGLPGGAAMTPGDTWASFNPRAGHS (SEQ ID NO:730), QGEGQESSGASRQDRHPVSHWVERQREAWGAPRSSSAGGVKVAATTEREPE FKIKTGKA (SEQ ID NO:731), IRHEGKRMLNESRKPLSFASRLSSLYFKLGFPFCGRSNLYSTCTAAPGGSPGLP LPFYPVADG (SEQ ID NO:732), TRAESLFPLLHAFPVFILNSGSLSVVAATFTPPALLLLGAPQASLCLSTQWLTG CLSCLDAPLLSCPSPWLLLCPALGLKLAHVSPGVMAAPPGRPLCASRLPHLGA AGEPVLCSPRLLGTELQPGXLRGPRLGILPGGRWEEQVLCLAAVSAFLDAPEH RSCRHFEVFLGMCQIT (SEQ ID NO:733), PALGLKLAHVSPGVMAAPPGRPLCASRLP (SEQ ID NO:734), GGRWEEQVLCLAAVSAFLDAPEHR (SEQ ID NO:735), SWPMCPPESWLLLLGGLCVRHVFHTWGQLASPCSVPLGCLAQSCSLGXSVDP DWGFCQGGDGRSRCFAWRLCLHFWTPQSTEVAGTLRSSSACARLHE (SEQ ID NO:736), and/or GDGRSRCFAWRLCLHFWTPQSTEVAGTLR (SEQ ID NO:737). Moreover, fragments and variants of these polypeptides (such as, for example, fragments as described herein, polypeptides at least 80%, 85%, 90%, 95%, 96%, 97%, 98%, or 99% identical to these polypeptides and polypeptides encoded by the polynucleotide which hybridizes, under stringent conditions, to the polynucleotide encoding these polypeptides) are encompassed by the invention. Antibodies that bind polypeptides of the invention are also encompassed by the invention. Polynucleotides encoding these polypeptides are also encompassed by the invention.

[0560] This gene is expressed primarily in fetal heart.

[0561] Polynucleotides and polypeptides of the invention are useful as reagents for differential identification of the tissue(s) or cell type(s) present in a biological sample and for diagnosis of diseases and conditions which include, but are not limited to, cardiovascular or developmental disorders, particularly vascular conditions. Similarly, polypeptides and antibodies directed to these polypeptides are useful in providing immunological probes for differential identification of the tissue(s) or cell type(s). For a number of disorders of the above tissues or cells, particularly of the cardiovascular system, expression of this gene at significantly higher or lower levels may be routinely detected in certain tissues or cell types (e.g., cardiovascular, developmental, skeletal, vascular, and cancerous and wounded tissues) or bodily fluids (e.g., lymph, amniotic fluid, serum, plasma, urine, synovial fluid and spinal fluid) or another tissue or cell sample taken from an individual having such a disorder, relative to the standard gene expression level, i.e., the expression level in healthy tissue or bodily fluid from an individual not having the disorder.

[0562] Predicted epitopes include those comprising a sequence shown in SEQ ID NO:317 as residues: Pro-32 to Ser-39.

[0563] The tissue distribution in fetal heart indicates that the protein product of this gene is useful for the treatment and diagnosis of cardiovascular disorders (e.g. heart disease, restenosis, atherosclerosis, stroke, angina, thrombosis), in addition to vascular disorders, such as microvascular disease. Expression within fetal tissue indicates that this protein may play a role in the regulation of cellular division, and may show utility in the diagnosis and treatment of cancer and other proliferative disorders. Similarly, developmental tissues rely on decisions involving cell differentiation and/or apoptosis in pattern formation. Thus this protein may also be involved in apoptosis or tissue differentiation and could again be useful in cancer therapy. Protein, as well as, antibodies directed against the protein may show utility as a tumor marker and/or immunotherapy targets for the above listed tissues.

[0564] Many polynucleotide sequences, such as EST sequences, are publicly available and accessible through sequence databases. Some of these sequences are related to SEQ ID NO:79 and may have been publicly available prior to conception of the present invention. Preferably, such related polynucleotides are specifically excluded from the scope of the present invention. To list every related sequence is cumbersome. Accordingly, preferably excluded from the present invention are one or more polynucleotides comprising a nucleotide sequence described by the general formula of a-b, where a is any integer between 1 to 647 of SEQ ID NO:79, b is an integer of 15 to 661, where both a and b correspond to the positions of nucleotide residues shown in SEQ ID NO:79, and where b is greater than or equal to a+14.

[0565] Features of Protein Encoded by Gene No: 70

[0566] The translation product of this gene shares sequence homology with a chicken single-strand DNA-binding protein. The promoter region of the chicken alpha2(I) collagen gene contains a pyrimidine-rich element that is well conserved in different mammalian species. This sequence can also form an unusual DNA structure as shown by its sensitivity to S1 nuclease in vitro and it lies in a region that is DNase I-hypersensitive only when this promoter is active. The high affinity of this protein for this conserved pyrimidine-rich region indicates that it might be involved in the transcriptional regulation of the alpha2(I) collagen gene.

[0567] In specific embodiments, polypeptides of the invention comprise, or alternatively consists of, an amino acid sequence selected from the group: MSPRYPGGPRPPLRIPNQALGGVPGSQPLLPSGMDPTRQQGHPNMGGPMQR MTPPRGMVPLGPQNYGGAMRPPLNALGGPGMPGMNMGPGGGRPWPNPTN ANSIPYSSASPGNYVGPPGGGGPPGTPIMPSPADSTNSGDNMYTLMNAVPPGP NRPNFPMGPGSDGPMGGLGGMESHHMNGSLGSGDMDSISKNSPNNMSLSNQ PGTPRDDGEMGGNFLNPFQSESYSPSMTMSV (SEQ ID NO:738), MSPRYPGGPRPPLRIPNQALGGVPGSQPLLPSGMDPTRQQGHPNMGGPMQR MTPPRGMVPLGPQNYGGAMRPPLNALGGPGMPGMNMGPGGGRPWPNPTN ANSIPYSSASPGNY (SEQ ID NO:739), LNALGGPGMPGMNMGPGGGRPWPNPTNANSIPYSSASPGNYVGPPGGGGPP GTPIMPSPADSTNSGDNMYTLMNAVPPGPN (SEQ ID NO:740), GPMGGLGGMESHHMNGSLGSGDMDSISKNSPNNMSLSNQPGTPRDDGEMG GNFLNPFQSESYSPSMTMSV (SEQ ID NO:741), TCEHSSEAKAFHDY (SEQ ID NO:742), and/or RRETCEHSSEAKAFHDYPF (SEQ ID NO:743). Moreover, fragments and variants of these polypeptides (such as, for example, fragments as described herein, polypeptides at least 80%, 85%, 90%, 95%, 96%, 97%, 98%, or 99% identical to these polypeptides and polypeptides encoded by the polynucleotide which hybridizes, under stringent conditions, to the polynucleotide encoding these polypeptides) are encompassed by the invention. Antibodies that bind polypeptides of the invention are also encompassed by the invention. Polynucleotides encoding these polypeptides are also encompassed by the invention. (See Genbank Accession No. 1562534)

[0568] This gene is expressed primarily in placenta, and to a lesser extent, in fetal heart.

[0569] Polynucleotides and polypeptides of the invention are useful as reagents for differential identification of the tissue(s) or cell type(s) present in a biological sample and for diagnosis of diseases and conditions which include, but are not limited to, developmental abnormalities, fetal deficiencies, and particularly of the cardiovascular system and/or vascular conditions. Similarly, polypeptides and antibodies directed to these polypeptides are useful in providing immunological probes for differential identification of the tissue(s) or cell type(s). For a number of disorders of the above tissues or cells, particularly of the reproductive system, expression of this gene at significantly higher or lower levels may be routinely detected in certain tissues or cell types (e.g., developmental, vascular, cardiovascular, reproductive, and cancerous and wounded tissues) or bodily fluids (e.g., lymph, amniotic fluid, serum, plasma, urine, synovial fluid and spinal fluid) or another tissue or cell sample taken from an individual having such a disorder, relative to the standard gene expression level, i.e., the expression level in healthy tissue or bodily fluid from an individual not having the disorder.

[0570] Predicted epitopes include those comprising a sequence shown in SEQ ID NO:318 as residues: Met-1 to Leu-13, Gly-33 to Gly-46, Pro-48 to Gly-57, Pro-63 to Gly-68, Pro-89 to Asn-102, Ser-108 to Asn-113, Pro-118 to Pro-124, Pro-132 to Asn-141, Pro-151 to Asn-157, Ile-191 to Met-199, Ser-202 to Gly-215, Phe-222 to Pro-229.

[0571] The tissue distribution in fetal heart and placenta indicates that the protein product of this gene is useful for the detection and treatment of developmental abnormalities or fetal deficiencies, ovarian and other endometrial cancers, reproductive dysfunction, cardiovascular disorders, and pre-natal disorders, in particular vascular disorders, which include, but are not limited to, stroke, angina, microvascular disease, atherosclerosis, embolism, and aneurysm. Protein, as well as, antibodies directed against the protein may show utility as a tumor marker and/or immunotherapy targets for the above listed tissues.

[0572] Many polynucleotide sequences, such as EST sequences, are publicly available and accessible through sequence databases. Some of these sequences are related to SEQ ID NO:80 and may have been publicly available prior to conception of the present invention. Preferably, such related polynucleotides are specifically excluded from the scope of the present invention. To list every related sequence is cumbersome. Accordingly, preferably excluded from the present invention are one or more polynucleotides comprising a nucleotide sequence described by the general formula of a-b, where a is any integer between 1 to 1364 of SEQ ID NO:80, b is an integer of 15 to 1378, where both a and b correspond to the positions of nucleotide residues shown in SEQ ID NO:80, and where b is greater than or equal to a+14.

[0573] Features of Protein Encoded by Gene No: 71

[0574] In specific embodiments, polypeptides of the invention comprise, or alternatively consists of, an amino acid sequence selected from the group: TITLFQSAWCFFSKYCTDFT (SEQ ID NO:744), VRGCEDGGGGGIWGGWWPGQQMAPPWLSCPHRQFPHFHSGRQRRQSDLLK EELPQPSGAAGRASGNKPYTPPPASNSLTLRLLSFRFNAFNRSHPQPSLNYKD RQ (SEQ ID NO:745), PWLSCPHRQFPHFHSGRQRRQSDLL (SEQ ID NO:746), and/or RLLSFRFNAFNRSHPQPSLN (SEQ ID NO:747). Moreover, fragments and variants of these polypeptides (such as, for example, fragments as described herein, polypeptides at least 80%, 85%, 90%, 95%, 96%, 97%, 98%, or 99% identical to these polypeptides and polypeptides encoded by the polynucleotide which hybridizes, under stringent conditions, to the polynucleotide encoding these polypeptides) are encompassed by the invention. Antibodies that bind polypeptides of the invention are also encompassed by the invention. Polynucleotides encoding these polypeptides are also encompassed by the invention.

[0575] The gene encoding the disclosed cDNA is believed to reside on chromosome 7. Accordingly, polynucleotides related to this invention are useful as a marker in linkage analysis for chromosome 7.

[0576] This gene is expressed primarily in fetal liver, and to a lesser extent, in the breast and testes.

[0577] Polynucleotides and polypeptides of the invention are useful as reagents for differential identification of the tissue(s) or cell type(s) present in a biological sample and for diagnosis of diseases and conditions which include, but are not limited to, hepatic disorders (including hepatoblastomas), hematopoietic, immune, and/or reproductive disorders. Similarly, polypeptides and antibodies directed to these polypeptides are useful in providing immunological probes for differential identification of the tissue(s) or cell type(s). For a number of disorders of the above tissues or cells, particularly of the hepatic and reproductive systems, expression of this gene at significantly higher or lower levels may be routinely detected in certain tissues or cell types (e.g., hematopoietic, immune, hepatic, reproductive, developmental, and cancerous and wounded tissues) or bodily fluids (e.g., lymph, amniotic fluid, bile, serum, plasma, urine, synovial fluid and spinal fluid) or another tissue or cell sample taken from an individual having such a disorder, relative to the standard gene expression level, i.e., the expression level in healthy tissue or bodily fluid from an individual not having the disorder.

[0578] The tissue distribution in fetal liver indicates that the protein product of this gene is useful for the detection and treatment of liver disorders and cancers (e.g. hepatoblastoma, jaundice, hepatitis, liver metabolic diseases and conditions that are attributable to the differentiation of hepatocyte progenitor cells). The expression in testes and breast indicates that the protein product of this gene is useful for the detection and treatment of endocrine and reproductive disorders (e.g. sperm maturation, milk production, testicular and breast cancers). Protein, as well as, antibodies directed against the protein may show utility as a tumor marker and/or immunotherapy targets for the above listed tissues.

[0579] Many polynucleotide sequences, such as EST sequences, are publicly available and accessible through sequence databases. Some of these sequences are related to SEQ ID NO:81 and may have been publicly available prior to conception of the present invention. Preferably, such related polynucleotides are specifically excluded from the scope of the present invention. To list every related sequence is cumbersome. Accordingly, preferably excluded from the present invention are one or more polynucleotides comprising a nucleotide sequence described by the general formula of a-b, where a is any integer between 1 to 1426 of SEQ ID NO:81, b is an integer of 15 to 1440, where both a and b correspond to the positions of nucleotide residues shown in SEQ ID NO:81, and where b is greater than or equal to a+14.

[0580] Features of Protein Encoded by Gene No: 72

[0581] In specific embodiments, polypeptides of the invention comprise, or alternatively consists of, an amino acid sequence selected from the group:

| | |
|---|---|
| RDSSLWAAALSFRQQCSSLASCLVSMYSRPGRQHRAKAGAGSQTEQCWGRK | (SEQ ID NO:748) |
| VDAVV, | |
| CLVSMYSRPGRQHRAKAGAGSQTEQCW, | (SEQ ID NO:749) |
| PEHGFSSCDFWEGAPSSGPKEGGRSPPQLACVWGMNLSSPPCLALLTNRACL | (SEQ ID NO:750) |
| AVNWHRVTLFPGIQVCNQNTGEEKLQDPCPHLSS, | |
| RSPPQLACVWGMNLSSPPCLALLTNRACLA, | (SEQ ID NO:751) |
| CERDSETSSIAMTCIKHKPPKQKKRLSLLPGFRSALPRVCRCHMITVQREAFRT | (SEQ ID NO:752) |
| HTGCSTSVHLPSRGGFLPDF, and/or | |
| KKRLSLLPGFRSALPRVCRCHMITVQRE. | (SEQ ID NO:753) |

[0582] Moreover, fragments and variants of these polypeptides (such as, for example, fragments as described herein, polypeptides at least 80%, 85%, 90%, 95%, 96%, 97%, 98%, or 99% identical to these polypeptides and polypeptides encoded by the polynucleotide which hybridizes, under stringent conditions, to the polynucleotide encoding these polypeptides) are encompassed by the invention. Antibodies that bind polypeptides of the invention are also encompassed by the invention. Polynucleotides encoding these polypeptides are also encompassed by the invention.

[0583] The gene encoding the disclosed cDNA is believed to reside on chromosome 1. Accordingly, polynucleotides related to this invention are useful as a marker in linkage analysis for chromosome 1.

[0584] This gene is expressed primarily in smooth muscle, and to a lesser extent, in brain.

[0585] Polynucleotides and polypeptides of the invention are useful as reagents for differential identification of the tissue(s) or cell type(s) present in a biological sample and for diagnosis of diseases and conditions which include, but are not limited to, cardiovascular and neurological disorders, particularly embolism, atherosclerosis, stroke, aneurysm, and microvascular disease. Similarly, polypeptides and antibodies directed to these polypeptides are useful in providing immunological probes for differential identification of the tissue(s) or cell type(s). For a number of disorders of the above tissues or cells, particularly of the cardiovascular and central nervous systems, expression of this gene at significantly higher or lower levels may be routinely detected in certain tissues or cell types (e.g., neural, vascular, endothelial, smooth muscle, and cancerous and wounded tissues) or bodily fluids (e.g., lymph, serum, plasma, urine, synovial fluid and spinal fluid) or another tissue or cell sample taken from an individual having such a disorder, relative to the standard gene expression level, i.e., the expression level in healthy tissue or bodily fluid from an individual not having the disorder.

[0586] The tissue distribution in brain and smooth muscle indicates that the protein product of this gene is useful for the detection and treatment of restenosis, atherosclerosis, stroke, angina, thrombosis, wound healing and other conditions of heart disease. Moreover, the protein product of this gene is useful for the detection and treatment of developmental, degenerative and behavioral conditions of the brain and nervous system (e.g. schizophrenia, depression, Alzheimer's disease, Parkinson's disease, Huntington's disease, mania, dementia, paranoia, addictive behavior and sleep disorders). Protein, as well as, antibodies directed against the protein may show utility as a tumor marker and/or immunotherapy targets for the above listed tissues.

[0587] Many polynucleotide sequences, such as EST sequences, are publicly available and accessible through sequence databases. Some of these sequences are related to SEQ ID NO:82 and may have been publicly available prior to conception of the present invention. Preferably, such related polynucleotides are specifically excluded from the scope of the present invention. To list every related sequence is cumbersome. Accordingly, preferably excluded from the present invention are one or more polynucleotides comprising a nucleotide sequence described by the general formula of a-b, where a is any integer between 1 to 1367 of SEQ ID NO:82, b is an integer of 15 to 1381, where both a and b correspond to the positions of nucleotide residues shown in SEQ ID NO:82, and where b is greater than or equal to a+14.

[0588] Features of Protein Encoded by Gene No: 73

[0589] This gene shares homology with human stromalin-2, which is believed to play an integral role in modulating cellular function of hematopoietic cells and tissues, and may possibly serve as a tumor suppressor.

[0590] In specific embodiments, polypeptides of the invention comprise, or alternatively consists of, an amino acid sequence selected from the group: QAFVLLSDLLLIFSPQMIVGGRDFLRPLVFFPEATLQSELASFLMDHVFIQPGD LGSGA (SEQ ID NO:754), ACSYLLCNPEFTFFSRADFARSQLVDLLTDRFQQELEELLQVG (SEQ ID NO:755), QKQLSSLRDRMVAFCELCQSCLSDVDTEIQEQVST (SEQ ID NO:756), QVILPALTLVYFSILWTLTHISKSDAS (SEQ ID NO:757), STHDLTRWELYEPCCQLLQKAVDTGXVPHQV (SEQ ID NO:758), TSFLFPLQAFVLLSDLLLIFSPQMIVGGRDFLRPLVFFPEATLQSELASFLMDH VFIQ PGDLGSGA (SEQ ID NO:759), GWGACSYLLCNPEFTFFSRADFARSQLVDLLTDRFQQELEELLQVGAGAGQ WDTPNKGGRGCKTGDVD (SEQ ID NO:760), VWVLDGIMGTEESVSSFFPFKPLCPQKQLSSLRDMVAFCELCQSCLSDVDTE IQEQVSTDSSGSNKASIPAPIPRRN (SEQ ID NO:761), NASLPSTSEWLSSSSPSRFYWCLWSWFPLFFSSITFPFLPQSTHDLTRWELYEP CCQLLQKAVDTGXVPHQVSGQARDGLGAGGLXFKDLRSRWPLGVSSLSAW SGQSEEDQVGGGHLLHSSLRRWTLLPGSSWISWKPRIILRDSRRRRVN (SEQ ID NO:762), VLGEMLLWIFFPSQSSFLDEDEVYNLAATLKRLSAFYK (SEQ ID NO:763), PKPHFSNPLLLQVILPALTLVYFSILWTLTHISKSDASPGECGS (SEQ ID NO:764), and/or HCQFLLG (SEQ ID NO:765). Moreover, fragments and variants of these polypeptides (such as, for example, fragments as described herein, polypeptides at least 80%, 85%, 90%, 95%, 96%, 97%, 98%, or 99% identical to these polypeptides and polypeptides encoded by the polynucleotide which hybridizes, under stringent conditions, to the polynucleotide encoding these polypeptides) are encompassed by the invention. Antibodies that bind polypeptides of the invention are also encompassed by the invention. Polynucleotides encoding these polypeptides are also encompassed by the invention. (See Genbank Accession No.R65208) The gene encoding the disclosed cDNA is believed to reside on chromosome 7. Accordingly, polynucleotides related to this invention are useful as a marker in linkage analysis for chromosome 7.

[0591] This gene is expressed primarily in the brain (infant brain, adult brain, pituitary, cerebellum, hippocampus, schizophrenic hypothalamus, amygdala).

[0592] Polynucleotides and polypeptides of the invention are useful as reagents for differential identification of the tissue(s) or cell type(s) present in a biological sample and for diagnosis of diseases and conditions which include, but are not limited to, developmental disorders and neurodegenerative diseases of the brain and nervous system, in addition to immune or hematopoietic disorders. Similarly, polypeptides and antibodies directed to these polypeptides are useful in providing immunological probes for differential identification of the tissue(s) or cell type(s). For a number of disorders of the above tissues or cells, particularly of the central nervous system, expression of this gene at significantly higher or lower levels may be routinely detected in certain tissues or cell types (e.g., neural, developmental, immune, hematopoietic, and cancerous and wounded tissues) or bodily fluids (e.g., lymph, amniotic fluid, serum, plasma, urine, synovial fluid and spinal fluid) or another tissue or cell sample taken from an individual having such a disorder, relative to the standard gene expression level, i.e., the expression level in healthy tissue or bodily fluid from an individual not having the disorder.

[0593] Predicted epitopes include those comprising a sequence shown in SEQ ID NO:321 as residues: Thr-25 to Lys-36, Lys-55 to Ser-63. The tissue distribution primarily in brain, combined with the homology to the highly conserved SA-1 and SA-2 proteins, indicates that the protein product of this gene is useful for the detection and treatment of developmental, degenerative and behavioral conditions of the brain and nervous system (e.g schizophrenia, depression, Alzheimer's disease, Parkinson's disease, Huntington's disease, mania, dementia, paranoia, addictive behavior and sleep disorders). Moreover, the protein product of this gene is useful for the treatment and diagnosis of hematopoetic related disorders such as anemia, pancytopenia, leukopenia, thrombocytopenia or leukemia since stromal cells are important in the production of cells of hematopoietic lineages. The uses include bone marrow cell ex vivo culture, bone marrow transplantation, bone marrow reconstitution, radiotherapy or chemotherapy of neoplasia. The gene product may also be involved in lymphopoiesis, therefore, it can be used in immune disorders such as infection, inflammation, allergy, immunodeficiency etc. In addition, this gene product may have commercial utility in the expansion of stem cells and committed progenitors of various blood lineages, and in the differentiation and/or proliferation of various cell types. Protein, as well as, antibodies directed against the protein may show utility as a tumor marker and/or immunotherapy targets for the above listed tissues.

[0594] Many polynucleotide sequences, such as EST sequences, are publicly available and accessible through sequence databases. Some of these sequences are related to SEQ ID NO:83 and may have been publicly available prior to conception of the present invention. Preferably, such related polynucleotides are specifically excluded from the scope of the present invention. To list every related sequence is cumbersome. Accordingly, preferably excluded from the present invention are one or more polynucleotides comprising a nucleotide sequence described by the general formula of a-b, where a is any integer between 1 to 1692 of SEQ ID NO:83, b is an integer of 15 to 1706, where both a and b correspond to the positions of nucleotide residues shown in SEQ ID NO:83, and where b is greater than or equal to a+14.

[0595] Features of Protein Encoded by Gene No: 74

[0596] In specific embodiments, polypeptides of the invention comprise, or alternatively consists of, an amino acid sequence selected from the group:

| | |
|---|---|
| [sequence omitted], | (SEQ ID NO:766) |
| TKPGMVGHVPIVPATKXAEAGGSPEPGSSTLQWPMITPCTPSWATEPDHVSEDE, and/or | (SEQ ID NO:767) |
| LLYHWETRAQPSLILYVVSDLRWMEFRTSC. | (SEQ ID NO:768) |

[0597] Moreover, fragments and variants of these polypeptides (such as, for example, fragments as described herein, polypeptides at least 80%, 85%, 90%, 95%, 96%, 97%, 98%, or 99% identical to these polypeptides and polypeptides encoded by the polynucleotide which hybridizes, under stringent conditions, to the polynucleotide encoding these polypeptides) are encompassed by the invention. Antibodies that bind polypeptides of the invention are also encompassed by the invention. Polynucleotides encoding these polypeptides are also encompassed by the invention.

[0598] This gene is expressed primarily in the hypothalamus of a human suffering from schizophrenia.

[0599] Polynucleotides and polypeptides of the invention are useful as reagents for differential identification of the tissue(s) or cell type(s) present in a biological sample and for diagnosis of diseases and conditions which include, but are not limited to, disorders of the CNS, particularly schizophrenia. Similarly, polypeptides and antibodies directed to these polypeptides are useful in providing immunological probes for differential identification of the tissue(s) or cell type(s). For a number of disorders of the above tissues or cells, particularly of the CNS, such as schizophrenia expression of this gene at significantly higher or lower levels may be routinely detected in certain tissues or cell types (e.g., neural, and cancerous and wounded tissues) or bodily fluids (e.g., lymph, serum, plasma, urine, synovial fluid and spinal fluid) or another tissue or cell sample taken from an individual having such a disorder, relative to the standard gene expression level, i.e., the expression level in healthy tissue or bodily fluid from an individual not having the disorder.

[0600] Predicted epitopes include those comprising a sequence shown in SEQ ID NO:322 as residues: Gly-38 to Ala-44.

[0601] The tissue distribution in the hypothalamus indicates that the protein products of this gene are useful for the study, diagnosis and treatment of schizophrenia and other disorders involving the CNS. Moreover, the protein product of this gene is useful for the detection/treatment of neurodegenerative disease states, behavioral disorders, or inflammatory conditions such as Alzheimer's Disease, Parkinson's Disease, Huntington's Disease, Tourette's Syndrome, meningitis, encephalitis, demyelinating diseases, peripheral neuropathies, neoplasia, trauma, congenital malformations, spinal cord injuries, ischemia and infarction, aneurysms, hemorrhages, mania, dementia, paranoia, obsessive compulsive disorder, panic disorder, learning disabilities, ALS, psychoses, autism, and altered behaviors, including disorders in feeding, sleep patterns, balance, and. perception. In addition, elevated expression of this gene product in regions of the brain indicates that it plays a role in normal neural function. Potentially, this gene product is involved in synapse formation, neurotransmission, learning, cognition, homeostasis, or neuronal differentiation or survival. Moreover, the gene or gene product may also play a role in the treatment and/or detection of developmental disorders associated with the developing embryo, sexually-linked disorders, or disorders of the cardiovascular system. Protein, as well as, antibodies directed against the protein may show utility as a tumor marker and/or immunotherapy targets for the above listed tissues.

[0602] Many polynucleotide sequences, such as EST sequences, are publicly available and accessible through sequence databases. Some of these sequences are related to SEQ ID NO:84 and may have been publicly available prior to conception of the present invention. Preferably, such related polynucleotides are specifically excluded from the scope of the present invention. To list every related sequence is cumbersome. Accordingly, preferably excluded from the present invention are one or more polynucleotides comprising a nucleotide sequence described by the general formula of a-b, where a is any integer between 1 to 559 of SEQ ID NO:84, b is an integer of 15 to 573, where both a and b correspond to the positions of nucleotide residues shown in SEQ ID NO:84, and where b is greater than or equal to a+14.

[0603] Features of Protein Encoded by Gene No: 75

[0604] In specific embodiments, polypeptides of the invention comprise, or alternatively consists of, an amino acid sequence selected from the group: LAVSTSFICCADISTALPLGSSRPAPAPRHREHEHGHQARPPRLLXTSLMPLST PAAAQLLWTQLTPMGGRPGGRHSPPTLHTGPRALPFIGPPHPSLHVAALSLLR (SEQ ID NO:769), APAVPHQPPGTESTSMGTKPGLPGCSXRPLCHYQHQLXPSYFGHSSPPWG AVLVGVTPHPRCTPAPGPCRLGLHTHPCTWQLCLC (SEQ ID NO:770), CADISTALPLGSSRPAPAPRHREHEHGH (SEQ ID NO:771), WTQLTPMGGRPGGRHSPPTLHTGPR (SEQ ID NO:772), and/or HQPPGTEST SMGTKPGLPGC (SEQ ID NO:773). Moreover, fragments and variants of these polypeptides (such as, for example, fragments as described herein, polypeptides at least 80%, 85%, 90%, 95%, 96%, 97%, 98%, or 99% identical to these polypeptides and polypeptides encoded by the polynucleotide which hybridizes, under stringent conditions, to the polynucleotide encoding these polypeptides) are encompassed by the invention. Antibodies that bind polypeptides of the invention are also encompassed by the invention. Polynucleotides encoding these polypeptides are also encompassed by the invention.

[0605] This gene is expressed primarily in endometrial tumors, and to a lesser extent, in amniotic cells.

[0606] Polynucleotides and polypeptides of the invention are useful as reagents for differential identification of the tissue(s) or cell type(s) present in a biological sample and for diagnosis of diseases and conditions which include, but are not limited to, reproductive, developmental, and immune disorders, particularly cancers of those systems. Similarly, polypeptides and antibodies directed to these polypeptides are useful in providing immunological probes for differential identification of the tissue(s) or cell type(s). For a number of disorders of the above tissues or cells, particularly of the reproductive and immune systems, expression of this gene at significantly higher or lower levels may be routinely detected in certain tissues or cell types (e.g., developmental, reproductive, and cancerous and wounded tissues) or bodily fluids (e.g., lymph, amniotic fluid, serum, plasma, urine, synovial fluid and spinal fluid) or another tissue or cell sample taken from an individual having such a disorder, relative to the standard gene expression level, i.e., the expression level in healthy tissue or bodily fluid from an individual not having the disorder.

[0607] Predicted epitopes include those comprising a sequence shown in SEQ ID NO:323 as residues: Ser-3 to Arg-9.

[0608] The tissue distribution in endometrium and amniotic cells indicates that the protein products of this gene are useful for the study and treatment of developmental, reproductive, and immune disorders, particularly cancers of those systems. Moreover, the expression within embryonic tissue and other cellular sources marked by proliferating cells indicates that this protein may play a role in the regulation of cellular division, and may show utility in the diagnosis and treatment of cancer and other proliferative disorders. Similarly, developmental tissues rely on decisions involving cell differentiation and/or apoptosis in pattern formation. Thus this protein may also be involved in apoptosis or tissue differentiation and could again be useful in cancer therapy. Protein, as well as, antibodies directed against the protein may show utility as a tumor marker and/or immunotherapy targets for the above listed tissues.

[0609] Many polynucleotide sequences, such as EST sequences, are publicly available and accessible through sequence databases. Some of these sequences are related to SEQ ID NO:85 and may have been publicly available prior to conception of the present invention. Preferably, such related polynucleotides are specifically excluded from the scope of the present invention. To list every related sequence is cumbersome. Accordingly, preferably excluded from the present invention are one or more polynucleotides comprising a nucleotide sequence described by the general formula of a-b, where a is any integer between 1 to 670 of SEQ ID NO:85, b is an integer of 15 to 684, where both a and b correspond to the positions of nucleotide residues shown in SEQ ID NO:85, and where b is greater than or equal to a+14.

[0610] Features of Protein Encoded by Gene No: 76

[0611] In specific embodiments, polypeptides of the invention comprise, or alternatively consists of, an amino acid sequence selected from the group:

| | |
|---|---|
| SRGSLLPPHLPHRVVVRVHRGAKSLKALRQYIGAAHLQLPWDGKDPARPLGI | (SEQ ID NO:774) |
| TLCLQMEIQVLG, | |
| CCSFGFYYMVGSDTAEKQGPIPGSQTQEGPWLSRHTHSPRAVPESSTAPAQ | (SEQ ID NO:775) |
| PLLLPLPAPQARRWASNANGWGWDHQREGQANYPYSARPAPHNLHPQYLN | |
| LHLQTQCYAQGSGWVLPIPG QLKVGGPYILPEGLQGLCSSVHPHNNPVR, | |
| HRGAKSLKALRQYIGAAHLQLPWDG, | (SEQ ID NO:776) |
| PAPQARRWASNANGWGWDHQR, and/or | (SEQ ID NO:777) |
| HPQYLNLHLQTQCYAQGSGWVLP. | (SEQ ID NO:778) |

[0612] Moreover, fragments and variants of these polypeptides (such as, for example, fragments as described herein, polypeptides at least 80%, 85%, 90%, 95%, 96%, 97%, 98%, or 99% identical to these polypeptides and polypeptides encoded by the polynucleotide which hybridizes, under stringent conditions, to the polynucleotide encoding these polypeptides) are encompassed by the invention. Antibodies that bind polypeptides of the invention are also encompassed by the invention. Polynucleotides encoding these polypeptides are also encompassed by the invention.

[0613] The gene encoding the disclosed cDNA is believed to reside on chromosome 22. Accordingly, polynucleotides related to this invention are useful as a marker in linkage analysis for chromosome 22.

[0614] This gene is expressed primarily in kidney cortex, and to a lesser extent, in early stage human brain.

[0615] Polynucleotides and polypeptides of the invention are useful as reagents for differential identification of the tissue(s) or cell type(s) present in a biological sample and for diagnosis of diseases and conditions which include, but are not limited to, renal disorders such as renal cancer, developmental, or neural disorders, particularly cancers. Similarly, polypeptides and antibodies directed to these polypeptides are useful in providing immunological probes for differential identification of the tissue(s) or cell type(s). For a number of disorders of the above tissues or cells, particularly of the kidney expression of this gene at significantly higher or lower levels may be routinely detected in certain tissues or cell types (e.g., developmental, neural, renal, urogenital, endothelial, vascular, and cancerous and wounded tissues) or bodily fluids (e.g., lymph, serum, plasma, urine, synovial fluid and spinal fluid) or another tissue or cell sample taken from an individual having such a disorder, relative to the standard gene expression level, i.e., the expression level in healthy tissue or bodily fluid from an individual not having the disorder.

[0616] Predicted epitopes include those comprising a sequence shown in SEQ ID NO:324 as residues: Gly-38 to Gly-45, Gly-47 to Gly-52, Pro-92 to Lys-110.

[0617] The tissue distribution in kidney cortex indicates that the protein products of this gene are useful for the study, treatment and diagnosis of renal diseases, including renal failure, nephritus, renal tubular acidosis, proteinuria, pyunria, edema, pyelonephritis, hydronephritis, nephrotic syndrome, crush syndrome, glomerulonephritis, hematuria, renal colic and kidney stones, in addition to Wilms Tumor Disease, and congenital kidney abnormalities such as horseshoe kidney, polycystic kidney, and Falconi's syndrome. Moreover, the expression within human brain indicates that the protein product of this gene is useful for the detection/treatment of neurodegenerative disease states, behavioral disorders, or inflammatory conditions such as Alzheimer's Disease, Parkinson's Disease, Huntington's Disease, Tourette's Syndrome, meningitis, encephalitis, demyelinating diseases, peripheral neuropathies, neoplasia, trauma, congenital malformations, spinal cord injuries, ischemia and infarction, aneurysms, hemorrhages, schizophrenia, mania, dementia, paranoia, obsessive compulsive disorder, panic disorder, learning disabilities, ALS, psychoses, autism, and altered behaviors, including disorders in feeding, sleep patterns, balance, and perception. In addition, elevated expression of this gene product in regions of the brain indicates that it plays a role in normal neural function. Potentially, this gene product is involved in synapse formation, neurotransmission, learning, cognition, homeostasis, or neuronal differentiation or survival. Moreover, the gene or gene product may also play a role in the treatment and/or detection of developmental disorders associated with the developing embryo, sexually-linked disorders, or disorders of the cardiovascular system. Furthermore, the protein product may also show utility in the treatment and/or prevention of a variety of vascular disorders, particularly embolism, aneurysm, stroke, atherosclerosis, or microvascular disease. Protein, as well as, antibodies directed against the protein may show utility as a tumor marker and/or immunotherapy targets for the above listed tissues.

[0618] Many polynucleotide sequences, such as EST sequences, are publicly available and accessible through sequence databases. Some of these sequences are related to SEQ ID NO:86 and may have been publicly available prior to conception of the present invention. Preferably, such related polynucleotides are specifically excluded from the scope of the present invention. To list every related sequence is cumbersome. Accordingly, preferably excluded from the present invention are one or more polynucleotides comprising a nucleotide sequence described by the general formula of a-b, where a is any integer between 1 to 1022 of SEQ ID NO:86, b is an integer of 15 to 1036, where both a and b correspond to the positions of nucleotide residues shown in SEQ ID NO:86, and where b is greater than or equal to a+14.

[0619] Features of Protein Encoded by Gene No: 77

[0620] In specific embodiments, polypeptides of the invention comprise, or alternatively consist of, the following amino acid sequences: TNGIMQYVTFCVWLILFSIMFLRFIQAVACISTSFLFLAEYYSIIWIYHNSFTYSS FVSAVWLL (SEQ ID NO:779), YNFMFNFSKNCQKVFHSGCIIYIPTGNVQGFLF FHILALTNT SFXXXFCFFIIATLVDVKWHLIVLICISLMTNDIILFLCAYGSK VFPWRNVPSSPLPFQNLVICLLLFSF KKFWPGAVAHL (SEQ ID NO:780), CVTQARVQWRDLGSLQPPPPGFKRFSCLSLLSRXDMHLPPRPANFCIFSKM GFHHVGQAGLEVLXSSDL PALASQSAXITGEPLRLARIS (SEQ ID NO:781), LILFSIMFLRFIQAVACISTSFLF (SEQ ID NO:783), and/or LPPRPANFCIFSK MGFHHVGQAGLE (SEQ ID NO:782). Moreover, fragments and variants of these polypeptides (such as, for example, fragments as described herein, polypeptides at least 80%, 85%, 90%, 95%, 96%, 97%, 98%, or 99% identical to these polypeptides and polypeptides encoded by the polynucleotide which hybridizes, under stringent conditions, to the polynucleotide encoding these polypeptides) are encompassed by the invention. Antibodies that bind polypeptides of the invention are also encompassed by the invention. Polynucleotides encoding these polypeptides are also encompassed by the invention.

[0621] This gene is expressed primarily in kidney medulla.

[0622] Polynucleotides and polypeptides of the invention are useful as reagents for differential identification of the tissue(s) or cell type(s) present in a biological sample and for diagnosis of diseases and conditions which include, but are not limited to, metabolic and renal disorders. Similarly, polypeptides and antibodies directed to these polypeptides are useful in providing immunological probes for differential identification of the tissue(s) or cell type(s). For a number of disorders of the above tissues or cells, particularly of the metabolic and renal systems, expression of this gene at significantly higher or lower levels may be routinely detected in certain tissues or cell types (e.g., renal, urogenital, endocrine, and cancerous and wounded tissues) or bodily fluids (e.g., lymph, serum, plasma, urine, synovial fluid and spinal fluid) or another tissue or cell sample taken from an individual having such a disorder, relative to the standard gene expression level, i.e., the expression level in healthy tissue or bodily fluid from an individual not having the disorder.

[0623] The tissue distribution in kidney tissue indicates that the protein products of this gene are useful for study, treatment and diagnosis of metabolic and renal diseases and disorders. Moreover, this gene or gene product could be used in the treatment and/or detection renal failure, nephritus, renal tubular acidosis, proteinuria, pyuria, edema, pyelonephritis, hydronephritis, nephrotic syndrome, crush syndrome, glomerulonephritis, hematuria, renal colic and kidney stones, in addition to Wilms Tumor Disease, and congenital kidney abnormalities such as horseshoe kidney, polycystic kidney, and Falconi's syndrome. Protein, as well as, antibodies directed against the protein may show utility as a tumor marker and/or immunotherapy targets for the above listed tissues.

[0624] Many polynucleotide sequences, such as EST sequences, are publicly available and accessible through sequence databases. Some of these sequences are related to SEQ ID NO:87 and may have been publicly available prior to conception of the present invention. Preferably, such related polynucleotides are specifically excluded from the scope of the present invention. To list every related sequence is cumbersome. Accordingly, preferably excluded from the present invention are one or more polynucleotides comprising a nucleotide sequence described by the general formula of a-b, where a is any integer between 1 to 894 of SEQ ID NO:87, b is an integer of 15 to 908, where both a and b correspond to the positions of nucleotide residues shown in SEQ ID NO:87, and where b is greater than or equal to a+14.

[0625] Features of Protein Encoded by Gene No: 78

[0626] In specific embodiments, polypeptides of the invention comprise, or alternatively consist of, the following amino acid sequences: ALVPSPQQILPSCFSLMWQVTTKSALVFFKCIYIPFLSAPSLPRLENCLIFCSLD VQSQLVFLSSPPVAGVLFFFLLSPLGSKSCSTVEX (SEQ ID NO:784), and/or APSLPRLENCLIFCSLDVQSQLVFLS (SEQ ID NO:785). Moreover, fragments and variants of these polypeptides (such as, for example, fragments as described herein, polypeptides at least 80%, 85%, 90%, 95%, 96%, 97%, 98%, or 99% identical to these polypeptides and polypeptides encoded by the polynucleotide which hybridizes, under stringent conditions, to the polynucleotide encoding these polypeptides) are encompassed by the invention. Antibodies that bind polypeptides of the invention are also encompassed by the invention. Polynucleotides encoding these polypeptides are also encompassed by the invention.

[0627] This gene is expressed in chronic synovitis and microvascular endothelium.

[0628] Polynucleotides and polypeptides of the invention are useful as reagents for differential identification of the tissue(s) or cell type(s) present in a biological sample and for diagnosis of diseases and conditions which include, but are not limited to, skeletal or vascular disorders, such as arthritis and atherosclerosis. Similarly, polypeptides and antibodies directed to these polypeptides are useful in providing immunological probes for differential identification of the tissue(s) or cell type(s). For a number of disorders of the above tissues or cells, particularly of the vascular and skeletal systems, expression of this gene at significantly higher or lower levels may be routinely detected in certain tissues or cell types (e.g., skeletal, synovium, endothelial cells, vascular, and cancerous and wounded tissues) or bodily fluids (e.g., lymph, serum, plasma, urine, synovial fluid and spinal fluid) or another tissue or cell sample taken from an individual having such a disorder, relative to the standard gene expression level, i.e., the expression level in healthy tissue or bodily fluid from an individual not having the disorder.

[0629] The tissue distribution in synovium and microvascular endothelium indicates that the protein products of this gene are useful for study, diagnosis and treatment of arthritic and other inflammatory diseases as well as cardiovascular diseases. Moreover, the expression of this gene product in synovium would suggest a role in the detection and treatment of disorders and conditions affecting the skeletal system, in particular osteoporosis, bone cancer, as well as, disorders afflicting connective tissues (e.g. arthritis, trauma, tendonitis, chrondomalacia and inflammation), such as in the diagnosis or treatment of various autoimmune disorders such as rheumatoid arthritis, lupus, scleroderma, and dermatomyositis as well as dwarfism, spinal deformation, and specific joint abnormalities as well as chondrodysplasias (i.e. spondyloepiphyseal dysplasia congenita, familial osteoarthritis, Atelosteogenesis type II, metaphyseal chondrodysplasia type Schmid). In addition, the protein would also be useful in the treatment and/or prevention of a variety of vascular disorders, which include, but are not limited to, microvascular disease, embolism, thrombosis, aneurysm, stroke, or atherosclerosis. Protein, as well as, antibodies directed against the protein may show utility as a tumor marker and/or immunotherapy targets for the above listed tissues.

[0630] Many polynucleotide sequences, such as EST sequences, are publicly available and accessible through sequence databases. Some of these sequences are related to SEQ ID NO:88 and may have been publicly available prior to conception of the present invention. Preferably, such related polynucleotides are specifically excluded from the scope of the present invention. To list every related sequence is cumbersome. Accordingly, preferably excluded from the present invention are one or more polynucleotides comprising a nucleotide sequence described by the general formula of a-b, where a is any integer between 1 to 641 of SEQ ID NO:88, b is an integer of 15 to 655, where both a and b correspond to the positions of nucleotide residues shown in SEQ ID NO:88, and where b is greater than or equal to a+14.

[0631] Features of Protein Encoded by Gene No: 79

[0632] In specific embodiments, polypeptides of the invention comprise, or alternatively consist of, the following amino acid sequences: SSPSRVRLRHTPG (SEQ ID NO:786), and/or SNTNYCFMFFYFPVKVLVPFKNCYILSLLILPCCICGHQFPRXQACTFCLHTLG GFSFSXLFLVLLSFYVQTGFSV (SEQ ID NO:787). Moreover, fragments and variants of these polypeptides (such as, for example, fragments as described herein, polypeptides at least 80%, 85%, 90%, 95%, 96%, 97%, 98%, or 99% identical to these polypeptides and polypeptides encoded by the polynucleotide which hybridizes, under stringent conditions, to the polynucleotide encoding these polypeptides) are encompassed by the invention. Antibodies that bind polypeptides of the invention are also encompassed by the invention. Polynucleotides encoding these polypeptides are also encompassed by the invention.

[0633] This gene is expressed in resting T-cells and activated monocytes.

[0634] Polynucleotides and polypeptides of the invention are useful as reagents for differential identification of the tissue(s) or cell type(s) present in a biological sample and for diagnosis of diseases and conditions which include, but are not limited to, immune or hematopoietic disorders. Similarly, polypeptides and antibodies directed to these polypeptides are useful in providing immunological probes for differential identification of the tissue(s) or cell type(s). For a number of disorders of the above tissues or cells, particularly of the immune system, expression of this gene at significantly higher or lower levels may be routinely detected in certain tissues or cell types (e.g., immune, hematopoietic, and cancerous and wounded tissues) or bodily fluids (e.g., lymph, serum, plasma, urine, synovial fluid and spinal fluid) or another tissue or cell sample taken from an individual having such a disorder, relative to the standard gene expression level, i.e., the expression level in healthy tissue or bodily fluid from an individual not having the disorder.

[0635] The tissue distribution in T-cells and monocytes indicates that the protein products of this gene are useful for the study and treatment of immune diseases such as inflammatory conditions. This gene product may be involved in the regulation of cytokine production, antigen presentation, or other processes that may also suggest a usefulness in the treatment of cancer (e.g. by boosting immune responses). Since the gene is expressed in cells of lymphoid origin, the natural gene product may be involved in immune functions. Therefore it may be also used as an agent for immunological disorders including arthritis, asthma, immunodeficiency diseases such as AIDS, leukemia, rheumatoid arthritis, granulomatous disease, inflammatory bowel disease, sepsis, acne, neutropenia, neutrophilia, psoriasis, hypersensitivities, such as T-cell mediated cytotoxicity; immune reactions to transplanted organs and tissues, such as host-versus-graft and graft-versus-host diseases, or autoimmunity disorders, such as autoimmune infertility, lens tissue injury, demyelination, systemic lupus erythematosis, drug induced hemolytic anemia, rheumatoid arthritis, Sjogren's disease, scleroderma and tissues. In addition, this gene product may have commercial utility in the expansion of stem cells and committed progenitors of various blood lineages, and in the differentiation and/or proliferation of various cell types. Protein, as well as, antibodies directed against the protein may show utility as a tumor marker and/or immunotherapy targets for the above listed tissues.

[0636] Many polynucleotide sequences, such as EST sequences, are publicly available and accessible through sequence databases. Some of these sequences are related to SEQ ID NO:89 and may have been publicly available prior to conception of the present invention. Preferably, such related polynucleotides are specifically excluded from the scope of the present invention. To list every related sequence is cumbersome. Accordingly, preferably excluded from the present invention are one or more polynucleotides comprising a nucleotide sequence described by the general formula of a-b, where a is any integer between 1 to 1088 of SEQ ID NO:89, b is an integer of 15 to 1102, where both a and b correspond to the positions of nucleotide residues shown in SEQ ID NO:89, and where b is greater than or equal to a+14.

[0637] Features of Protein Encoded by Gene No: 80

[0638] In specific embodiments, polypeptides of the invention comprise, or alternatively consist of, the following amino acid sequences: GTSRHGQRPIAPGTPWQREPRVEVMDPAGGPRGVLPRPCRXLVLLNPRGGKG KALQLFRSHVQPLLAEAEISFTLMLTERRNHARELVRSEELGRWXALVVMXG D GLMHEVVNGLHGAA (SEQ ID NO:788), and/or RPIAPGTPWQREPRVEVMDPAGGP (SEQ ID NO:789). Moreover, fragments and variants of these polypeptides (such as, for example, fragments as described herein, polypeptides at least 80%, 85%, 90%, 95%, 96%, 97%, 98%, or 99% identical to these polypeptides and polypeptides encoded by the polynucleotide which hybridizes, under stringent conditions, to the polynucleotide encoding these polypeptides) are encompassed by the invention. Antibodies that bind polypeptides of the invention are also encompassed by the invention. Polynucleotides encoding these polypeptides are also encompassed by the invention.

[0639] The gene encoding the disclosed cDNA is believed to reside on chromosome 17. Accordingly, polynucleotides related to this invention are useful as a marker in linkage analysis for chromosome 17.

[0640] This gene is expressed in a variety of immune system tissues, e.g., neutrophils, T-cells, and TNF induced epithelial and endothelial cells.

[0641] Polynucleotides and polypeptides of the invention are useful as reagents for differential identification of the tissue(s) or cell type(s) present in a biological sample and for diagnosis of diseases and conditions which include, but are not limited to, infectious and immune or hematopoietic disorders. Similarly, polypeptides and antibodies directed to these polypeptides are useful in providing immunological probes for differential identification of the tissue(s) or cell type(s). For a number of disorders of the above tissues or cells, particularly of the immune and vascular systems, expression of this gene at significantly higher or lower levels may be routinely detected in certain tissues or cell types (e.g., immune, hematopoietic, and cancerous and wounded tissues) or bodily fluids (e.g., lymph, serum, plasma, urine, synovial fluid and spinal fluid) or another tissue or cell sample taken from an individual having such a disorder, relative to the standard gene expression level, i.e., the expression level in healthy tissue or bodily fluid from an individual not having the disorder.

[0642] Predicted epitopes include those comprising a sequence shown in SEQ ID NO:328 as residues: Met-1 to Trp-6.

[0643] The tissue distribution in immune tissues and cells indicates that the protein products of this gene are useful for the study and treatment of infectious diseases, immune and vascular disorders. Moreover, this gene product may be involved in the regulation of cytokine production, antigen presentation, or other processes that may also suggest a usefulness in the treatment of cancer (e.g. by boosting immune responses). Since the gene is expressed in cells of lymphoid origin, the natural gene product may be involved in immune functions. Therefore it may be also used as an agent for immunological disorders including arthritis, asthma, immunodeficiency diseases such as AIDS, leukemia, rheumatoid arthritis, granulomatous disease, inflammatory bowel disease, sepsis, acne, neutropenia, neutrophilia, psoriasis, hypersensitivities, such as T-cell mediated cytotoxicity; immune reactions to transplanted organs and tissues, such as host-versus-graft and graft-versus-host diseases, or autoimmunity disorders, such as autoimmune infertility, lens tissue injury, demyelination, systemic lupus erythematosis, drug induced hemolytic anemia, rheumatoid arthritis, Sjogren's disease, scleroderma and tissues. In addition, this gene product may have commercial utility in the expansion of stem cells and committed progenitors of various blood lineages, and in the differentiation and/or proliferation of various cell types. Protein, as well as, antibodies directed against the protein may show utility as a tumor marker and/or immunotherapy targets for the above listed tissues.

[0644] Many polynucleotide sequences, such as EST sequences, are publicly available and accessible through sequence databases. Some of these sequences are related to SEQ ID NO:90 and may have been publicly available prior to conception of the present invention. Preferably, such related polynucleotides are specifically excluded from the scope of the present invention. To list every related sequence is cumbersome. Accordingly, preferably excluded from the present invention are one or more polynucleotides comprising a nucleotide sequence described by the general formula of a-b, where a is any integer between 1 to 1519 of SEQ ID NO:90, b is an integer of 15 to 1533, where both a and b correspond to the positions of nucleotide residues shown in SEQ ID NO:90, and where b is greater than or equal to a+14.

[0645] Features of Protein Encoded by Gene No: 81

[0646] In specific embodiments, polypeptides of the invention comprise, or alternatively consists of, the following amino acid sequence: ASGPLMGXAVLKIFE (SEQ ID NO:790). Polynucleotides encoding these polypeptides are also encompassed by the invention.

[0647] This gene is expressed in activated neutrophils.

[0648] Polynucleotides and polypeptides of the invention are useful as reagents for differential identification of the tissue(s) or cell type(s) present in a biological sample and for diagnosis of diseases and conditions which include, but are not limited to, inflammation and other immune or hematopoietic conditions. Similarly, polypeptides and antibodies directed to these polypeptides are useful in providing immunological probes for differential identification of the tissue(s) or cell type(s). For a number of disorders of the above tissues or cells, particularly of the immune system, expression of this gene at significantly higher or lower levels may be routinely detected in certain tissues or cell types (e.g., immune, hematopoietic, and cancerous and wounded tissues) or bodily fluids (e.g., lymph, serum, plasma, urine, synovial fluid and spinal fluid) or another tissue or cell sample taken from an individual having such a disorder, relative to the standard gene expression level, i.e., the expression level in healthy tissue or bodily fluid from an individual not having the disorder.

[0649] The tissue distribution in neutrophils indicates that the protein products of this gene are useful for the study and treatment of immune disorders. Moreover, this gene product may be involved in the regulation of cytokine production, antigen presentation, or other processes that may also suggest a usefulness in the treatment of cancer (e.g. by boosting immune responses). Since the gene is expressed in cells of lymphoid origin, the natural gene product may be involved in immune functions. Therefore it may be also used as an agent for immunological disorders including arthritis, asthma, immunodeficiency diseases such as AIDS, leukemia, rheumatoid arthritis, granulomatous disease, inflammatory bowel disease, sepsis, acne, neutropenia, neutrophilia, psoriasis, hypersensitivities, such as T-cell mediated cytotoxicity; immune reactions to transplanted organs and tissues, such as host-versus-graft and graft-versus-host diseases, or autoimmunity disorders, such as autoimmune infertility, lens tissue injury, demyelination, systemic lupus erythematosis, drug induced hemolytic anemia, rheumatoid arthritis, Sjogren's disease, scleroderma and tissues. In addition, this gene product may have commercial utility in the expansion of stem cells and committed progenitors of various blood lineages, and in the differentiation and/or proliferation of various cell types. Protein, as well as, antibodies directed against the protein may show utility as a tumor marker and/or immunotherapy targets for the above listed tissues.

[0650] Many polynucleotide sequences, such as EST sequences, are publicly available and accessible through sequence databases. Some of these sequences are related to SEQ ID NO:91 and may have been publicly available prior to conception of the present invention. Preferably, such related polynucleotides are specifically excluded from the scope of the present invention. To list every related sequence is cumbersome. Accordingly, preferably excluded from the present invention are one or more polynucleotides comprising a nucleotide sequence described by the general formula of a-b, where a is any integer between 1 to 561 of SEQ ID NO:91, b is an integer of 15 to 575, where both a and b correspond to the positions of nucleotide residues shown in SEQ ID NO:91, and where b is greater than or equal to a+14.

[0651] Features of Protein Encoded by Gene No: 82

[0652] In specific embodiments, polypeptides of the invention comprise, or alternatively consist of, the following amino acid sequences: LLRSALXSPHLPTPVPLV (SEQ ID NO:791), QXRNLAQEAFKWIPQDRPTVRSRXRMGLSIRLPILASNCCALPFXXPTSPLQC LWSCHCSFQANTGLAS (SEQ ID NO:792), QMTQEPPTSVRAHGIAAWGNGCRDKNTKRLIQYWPESCSGMTKGTGVGRW GEXRAERSS (SEQ ID NO:793), and/or HGIAAWGNGCRDKNTKRLIQY (SEQ ID NO:794). Moreover, fragments and variants of these polypeptides (such as, for example, fragments as described herein, polypeptides at least 80%, 85%, 90%, 95%, 96%, 97%, 98%, or 99% identical to these polypeptides and polypeptides encoded by the polynucleotide which hybridizes, under stringent conditions, to the polynucleotide encoding these polypeptides) are encompassed by the invention. Antibodies that bind polypeptides of the invention are also encompassed by the invention. Polynucleotides encoding these polypeptides are also encompassed by the invention.

[0653] This gene is expressed in neutrophils.

[0654] Polynucleotides and polypeptides of the invention are useful as reagents for differential identification of the tissue(s) or cell type(s) present in a biological sample and for diagnosis of diseases and conditions which include, but are not limited to, inflammatory and other immune or hematopoietic conditions. Similarly, polypeptides and antibodies directed to these polypeptides are useful in providing immunological probes for differential identification of the tissue(s) or cell type(s). For a number of disorders of the above tissues or cells, particularly of the immune system, expression of this gene at significantly higher or lower levels may be routinely detected in certain tissues or cell types (e.g., immune, hematopoietic, and cancerous and wounded tissues) or bodily fluids (e.g., lymph, serum, plasma, urine, synovial fluid and spinal fluid) or another tissue or cell sample taken from an individual having such a disorder, relative to the standard gene expression level, i.e., the expression level in healthy tissue or bodily fluid from an individual not having the disorder.

[0655] Predicted epitopes include those comprising a sequence shown in SEQ ID NO:330 as residues: Ala-83 to Thr-91.

[0656] The tissue distribution in neutrophils indicates that the protein products of this gene are useful for the study and treatment of immune disorders. Moreover, the expression of this gene product in neutrophils indicates a role in the regulation of the proliferation; survival; differentiation; and/or activation of hematopoietic cell lineages, including blood stem cells. This gene product may be involved in the regulation of cytokine production, antigen presentation, or other processes that may also suggest a usefulness in the treatment of cancer (e.g. by boosting immune responses). Since the gene is expressed in cells of lymphoid origin, the natural gene product may be involved in immune functions. Therefore it may be also used as an agent for immunological disorders including arthritis, asthma, immunodeficiency diseases such as AIDS, leukemia, rheumatoid arthritis, granulomatous disease, inflammatory bowel disease, sepsis, acne, neutropenia, neutrophilia, psoriasis, hypersensitivities, such as T-cell mediated cytotoxicity; immune reactions to transplanted organs and tissues, such as host-versus-graft and graft-versus-host diseases, or autoimmunity disorders, such as autoimmune infertility, lens tissue injury, demyelination, systemic lupus erythematosis, drug induced hemolytic anemia, rheumatoid arthritis, Sjogren's disease, scleroderma and tissues. In addition, this gene product may have commercial utility in the expansion of stem cells and committed progenitors of various blood lineages, and in the differentiation and/or proliferation of various cell types. Protein, as well as, antibodies directed against the protein may show utility as a tumor marker and/or immunotherapy targets for the above listed tissues.

[0657] Many polynucleotide sequences, such as EST sequences, are publicly available and accessible through sequence databases. Some of these sequences are related to SEQ ID NO:92 and may have been publicly available prior to conception of the present invention. Preferably, such related polynucleotides are specifically excluded from the scope of the present invention. To list every related sequence is cumbersome. Accordingly, preferably excluded from the present invention are one or more polynucleotides comprising a nucleotide sequence described by the general formula of a-b, where a is any integer between 1 to 625 of SEQ ID NO:92, b is an integer of 15 to 639, where both a and b correspond to the positions of nucleotide residues shown in SEQ ID NO:92, and where b is greater than or equal to a+14.

[0658] Features of Protein Encoded by Gene No: 83

[0659] In specific embodiments, polypeptides of the invention comprise, or alternatively consist of, the following amino acid sequences: CERSGYTRMAMDT (SEQ ID NO:795), TGSILAVGKKYSLGSYSRGDWHMRVVGLRGLGASTLQGLLIGIKPNKPQGRG KLQGRSSRKDTVLWPSPEHPHMVSMAILVYPDLSHYSNPHSTPAALLGCWPP FREGEILGLQRPGQWPEERCDRPWLPPC (SEQ ID NO:796), GSYSRGDWHMRVVGLRGLGASTLQGLLIG (SEQ ID NO:797), and/or STPAALLGCWPPFREGEILGLQRPGQW (SEQ ID NO:798). Moreover, fragments and variants of these polypeptides (such as, for example, fragments as described herein, polypeptides at least 80%, 85%, 90%, 95%, 96%, 97%, 98%, or 99% identical to these polypeptides and polypeptides encoded by the polynucleotide which hybridizes, under stringent conditions, to the polynucleotide encoding these polypeptides) are encompassed by the invention. Antibodies that bind polypeptides of the invention are also encompassed by the invention. Polynucleotides encoding these polypeptides are also encompassed by the invention.

[0660] This gene is expressed in human neutrophils.

[0661] Polynucleotides and polypeptides of the invention are useful as reagents for differential identification of the tissue(s) or cell type(s) present in a biological sample and for diagnosis of diseases and conditions which include, but are not limited to, inflammation and immune or hematopoietic disorders. Similarly, polypeptides and antibodies directed to these polypeptides are useful in providing immunological probes for differential identification of the tissue(s) or cell type(s). For a number of disorders of the above tissues or cells, particularly of the immune and inflammatory system, expression of this gene at significantly higher or lower levels may be routinely detected in certain tissues or cell types (e.g., immune, hematopoietic, and cancerous and wounded tissues) or bodily fluids (e.g., lymph, serum, plasma, urine, synovial fluid and spinal fluid) or another tissue or cell sample taken from an individual having such a disorder, relative to the standard gene expression level, i.e., the expression level in healthy tissue or bodily fluid from an individual not having the disorder.

[0662] The tissue distribution in neutrophils indicates that the protein products of this gene are useful for diagnosis and treatment of disorders of the inflammatory and immune systems. Moreover, expression of this gene product in neutrophils indicates a role in the regulation of the proliferation; survival; differentiation; and/or activation of hematopoietic cell lineages, including blood stem cells. This gene product may be involved in the regulation of cytokine production, antigen presentation, or other processes that may also suggest a usefulness in the treatment of cancer (e.g. by boosting immune responses). Since the gene is expressed in cells of lymphoid origin, the natural gene product may be involved in immune functions. Therefore it may be also used as an agent for immunological disorders including arthritis, asthma, immunodeficiency diseases such as AIDS, leukemia, rheumatoid arthritis, granulomatous disease, inflammatory bowel disease, seps is, acne, neutropenia, neutrophilia, psoriasis, hypersensitivities, such as T-cell mediated cytotoxicity; immune reactions to transplanted organs and tissues, such as host-versus-graft and graft-versus-host diseases, or autoimmunity disorders, such as autoimmune infertility, lens tissue injury, demyelination, systemic lupus erythematosis, drug induced hemolytic anemia, rheumatoid arthritis, Sjogren's disease, scleroderma and tissues. In addition, this gene product may have commercial utility in the expansion of stem cells and committed progenitors of various blood lineages, and in the differentiation and/or proliferation of various cell types. Protein, as well as, antibodies directed against the protein may show utility as a tumor marker and/or immunotherapy targets for the above listed tissues.

[0663] Many polynucleotide sequences, such as EST sequences, are publicly available and accessible through sequence databases. Some of these sequences are related to SEQ ID NO:93 and may have been publicly available prior to conception of the present invention. Preferably, such related polynucleotides are specifically excluded from the scope of the present invention. To list every related sequence is cumbersome. Accordingly, preferably excluded from the present invention are one or more polynucleotides comprising a nucleotide sequence described by the general formula of a-b, where a is any integer between 1 to 844 of SEQ ID NO:93, b is an integer of 15 to 858, where both a and b correspond to the positions of nucleotide residues shown in SEQ ID NO:93, and where b is greater than or equal to a+14.

[0664] Features of Protein Encoded by Gene No: 84

[0665] In specific embodiments, polypeptides of the invention comprise, or alternatively consist of, the following amino acid sequences: TMGTWVDWLTTNTAHTPAIAAAICAEDFPQRHCGSVERSPDQAC (SEQ ID NO:799), and/or TNTAHTPAIAAAICAEDFPQRHC (SEQ ID NO:800). Moreover, fragments and variants of these polypeptides (such as, for example, fragments as described herein, polypeptides at least 80%, 85%, 90%, 95%, 96%, 97%, 98%, or 99% identical to these polypeptides and polypeptides encoded by the polynucleotide which hybridizes, under stringent conditions, to the polynucleotide encoding these polypeptides) are encompassed by the invention. Antibodies that bind polypeptides of the invention are also encompassed by the invention. Polynucleotides encoding these polypeptides are also encompassed by the invention.

[0666] This gene is expressed in human neutrophils.

[0667] Polynucleotides and polypeptides of the invention are useful as reagents for differential identification of the tissue(s) or cell type(s) present in a biological sample and for diagnosis of diseases and conditions which include, but are not limited to, inflammatory and immune or hematopoietic disorders. Similarly, polypeptides and antibodies directed to these polypeptides are useful in providing immunological probes for differential identification of the tissue(s) or cell type(s). For a number of disorders of the above tissues or cells, particularly of the inflammatory and immune systems, expression of this gene at significantly higher or lower levels may be routinely detected in certain tissues or cell types (e.g., immune, hematopoietic, and cancerous and wounded tissues) or bodily fluids (e.g., lymph, serum, plasma, urine, synovial fluid and spinal fluid) or another tissue or cell sample taken from an individual having such a disorder, relative to the standard gene expression level, i.e., the expression level in healthy tissue or bodily fluid from an individual not having the disorder.

[0668] The tissue distribution in neutrophils indicates that the protein products of this gene are useful for diagnosis and treatment of disorders of the immune and inflammatory systems. Moreover, the expression of this gene product indicates a role in the regulation of the proliferation; survival; differentiation; and/or activation of hematopoietic cell lineages, including blood stem cells. This gene product may be involved in the regulation of cytokine production, antigen presentation, or other processes that may also suggest a usefulness in the treatment of cancer (e.g. by boosting immune responses). Since the gene is expressed in cells of lymphoid origin, the natural gene product may be involved in immune functions. Therefore it may be also used as an agent for immunological disorders including arthritis, asthma, immunodeficiency diseases such as AIDS, leukemia, rheumatoid arthritis, granulomatous disease, inflammatory bowel disease, sepsis, acne, neutropenia, neutrophilia, psoriasis, hypersensitivities, such as T-cell mediated cytotoxicity; immune reactions to transplanted organs and tissues, such as host-versus-graft and graft-versus-host diseases, or autoimmunity disorders, such as autoimmune infertility, lens tissue injury, demyelination, systemic lupus erythematosis, drug induced hemolytic anemia, rheumatoid arthritis, Sjogren's disease, scleroderma and tissues. In addition, this gene product may have commercial utility in the expansion of stem cells and committed progenitors of various blood lineages, and in the differentiation and/or proliferation of various cell types. Protein, as well as, antibodies directed against the protein may show utility as a tumor marker and/or immunotherapy targets for the above listed tissues.

[0669] Many polynucleotide sequences, such as EST sequences, are publicly available and accessible through sequence databases. Some of these sequences are related to SEQ ID NO:94 and may have been publicly available prior to conception of the present invention. Preferably, such related polynucleotides are specifically excluded from the scope of the present invention. To list every related sequence is cumbersome. Accordingly, preferably excluded from the present invention are one or more polynucleotides comprising a nucleotide sequence described by the general formula of a-b, where a is any integer between 1 to 512 of SEQ ID NO:94, b is an integer of 15 to 526, where both a and b correspond to the positions of nucleotide residues shown in SEQ ID NO:94, and where b is greater than or equal to a+14.

[0670] Features of Protein Encoded by Gene No: 85

[0671] In specific embodiments, polypeptides of the invention comprise, or alternatively consist of, the following amino acid sequences: MSPETKGKGRSFPLK (SEQ ID NO:801), CQNKCSETTCGRTRRESNKQARAMAFIFKGKDLPFPFVSGDIQPKSSGSMAPD QQGLCYLGSWRSHLYCRLLPMDQVSPALC (SEQ ID NO:802), KPSPGLAYCSLSWSFHMLFLNICSGITIPVILSSGPSHLSTLSLAVSPRRPGTWV KACSCWCP (SEQ ID NO:803), NKQARAMAFIFKGKDLPFPFVSGDI (SEQ ID NO:804), YLGSWRSHLYCRLLPMDQVSP (SEQ ID NO:805), and/or GITIPVILSSGPSHLSTLSLAVSPR (SEQ ID NO:806). Moreover, fragments and variants of these polypeptides (such as, for example, fragments as described herein, polypeptides at least 80%, 85%, 90%, 95%, 96%, 97%, 98%, or 99% identical to these polypeptides and polypeptides encoded by the polynucleotide which hybridizes, under stringent conditions, to the polynucleotide encoding these polypeptides) are encompassed by the invention. Antibodies that bind polypeptides of the invention are also encompassed by the invention. Polynucleotides encoding these polypeptides are also encompassed by the invention.

[0672] This gene is expressed inactivated neutrophils.

[0673] Polynucleotides and polypeptides of the invention are useful as reagents for differential identification of the tissue(s) or cell type(s) present in a biological sample and for diagnosis of diseases and conditions which include, but are not limited to, inflammation and immune or hematopoietic diseases. Similarly, polypeptides and antibodies directed to these polypeptides are useful in providing immunological probes for differential identification of the tissue(s) or cell type(s). For a number of disorders of the above tissues or cells, particularly of the immune system and inflammatory system, expression of this gene at significantly higher or lower levels may be routinely detected in certain tissues or cell types (e.g., immune, hematopoietic, and cancerous and wounded tissues) or bodily fluids (e.g., lymph, serum, plasma, urine, synovial fluid and spinal fluid) or another tissue or cell sample taken from an individual having such a disorder, relative to the standard gene expression level, i.e., the expression level in healthy tissue or bodily fluid from an individual not having the disorder.

[0674] The tissue distribution in neutrophils indicates that the protein products of this gene are useful for diagnosis and treatment of diseases of the inflammatory and immune systems. Moreover, the expression of this gene product indicates a role in the regulation of the proliferation; survival; differentiation; and/or activation of hematopoietic cell lineages, including blood stem cells. This gene product may be involved in the regulation of cytokine production, antigen presentation, or other processes that may also suggest a usefulness in the treatment of cancer (e.g. by boosting immune responses). Since the gene is expressed in cells of lymphoid origin, the natural gene product may be involved in immune functions. Therefore it may be also used as an agent for immunological disorders including arthritis, asthma, immunodeficiency diseases such as AIDS, leukemia, rheumatoid arthritis, granulomatous disease, inflammatory bowel disease, sepsis, acne, neutropenia, neutrophilia, psoriasis, hypersensitivities, such as T-cell mediated cytotoxicity; immune reactions to transplanted organs and tissues, such as host-versus-graft and graft-versus-host diseases, or autoimmunity disorders, such as autoimmune infertility, lens tissue injury, demyelination, systemic lupus erythematosis, drug induced hemolytic anemia, rheumatoid arthritis, Sjogren's disease, scleroderma and tissues. In addition, this gene product may have commercial utility in the expansion of stem cells and committed progenitors of various blood lineages, and in the differentiation and/or proliferation of various cell types. Protein, as well as, antibodies directed against the protein may show utility as a tumor marker and/or immunotherapy targets for the above listed tissues.

[0675] Many polynucleotide sequences, such as EST sequences, are publicly available and accessible through sequence databases. Some of these sequences are related to SEQ ID NO:95 and may have been publicly available prior to conception of the present invention. Preferably, such related polynucleotides are specifically excluded from the scope of the present invention. To list every related sequence is cumbersome. Accordingly, preferably excluded from the present invention are one or more polynucleotides comprising a nucleotide sequence described by the general formula of a-b, where a is any integer between 1 to 412 of SEQ ID NO:95, b is an integer of 15 to 426, where both a and b correspond to the positions of nucleotide residues shown in SEQ ID NO:95, and where b is greater than or equal to a+14.

[0676] Features of Protein Encoded by Gene No: 86

[0677] In specific embodiments, polypeptides of the invention comprise, or alternatively consist of, the following amino acid sequences: LERLGVGRGLE (SEQ ID NO:807), DLPPCWTTLKEHQCFMQYQLFTIQCKVVEQTICEDERKMESTCLTLAXPESV RQXCPATLWSSMNIC (SEQ ID NO:808), and/or TNRVXLSWRKEEQRMGRTETGAKDKGRDFLERGSRGWQLYTGAADTEEV (SEQ ID NO:809). Moreover, fragments and variants of these polypeptides (such as, for example, fragments as described herein, polypeptides at least 80%, 85%, 90%, 95%, 96%, 97%, 98%, or 99% identical to these polypeptides and polypeptides encoded by the polynucleotide which hybridizes, under stringent conditions, to the polynucleotide encoding these polypeptides) are encompassed by the invention. Antibodies that bind polypeptides of the invention are also encompassed by the invention. Polynucleotides encoding these polypeptides are also encompassed by the invention.

[0678] This gene is expressed in activated neutrophils.

[0679] Polynucleotides and polypeptides of the invention are useful as reagents for differential identification of the tissue(s) or cell type(s) present in a biological sample and for diagnosis of diseases and conditions which include, but are not limited to, inflammation and immune system disorders. Similarly, polypeptides and antibodies directed to these polypeptides are useful in providing immunological probes for differential identification of the tissue(s) or cell type(s). For a number of disorders of the above tissues or cells, particularly of the inflammatory and immune system, expression of this gene at significantly higher or lower levels may be routinely detected in certain tissues or cell types (e.g., immune, hematopoietic, and cancerous and wounded tissues) or bodily fluids (e.g., lymph, serum, plasma, urine, synovial fluid and spinal fluid) or another tissue or cell sample taken from an individual having such a disorder, relative to the standard gene expression level, i.e., the expression level in healthy tissue or bodily fluid from an individual not having the disorder.

[0680] Predicted epitopes include those comprising a sequence shown in SEQ ID NO:334 as residues: Met-1 to Gly-6, Gly-32 to Pro-43, Leu-55 to Gln-60.

[0681] The tissue distribution in neutrophils indicates that the protein products of this gene are useful for diagnosis and treatment of disorders of the immune and inflammatory system. Moreover, the expression of this gene product indicates a role in the regulation of the proliferation; survival; differentiation; and/or activation of hematopoietic cell lineages, including blood stem cells. This gene product may be involved in the regulation of cytokine production, antigen presentation, or other processes that may also suggest a usefulness in the treatment of cancer (e.g. by boosting immune responses). Since the gene is expressed in cells of lymphoid origin, the natural gene product may be involved in immune functions. Therefore it may be also used as an agent for immunological disorders including arthritis, asthma, immunodeficiency diseases such as AIDS, leukemia, rheumatoid arthritis, granulomatous disease, inflammatory bowel disease, sepsis, acne, neutropenia, neutrophilia, psoriasis, hypersensitivities, such as T-cell mediated cytotoxicity; immune reactions to transplanted organs and tissues, such as host-versus-graft and graft-versus-host diseases, or autoimmunity disorders, such as autoimmune infertility, lens tissue injury, demyelination, systemic lupus erythematosis, drug induced hemolytic anemia, rheumatoid arthritis, Sjogren's disease, scleroderma and tissues. In addition, this gene product may have commercial utility in the expansion of stem cells and committed progenitors of various blood lineages, and in the differentiation and/or proliferation of various cell types. Protein, as well as, antibodies directed against the protein may show utility as a tumor marker and/or immunotherapy targets for the above listed tissues.

[0682] Many polynucleotide sequences, such as EST sequences, are publicly available and accessible through sequence databases. Some of these sequences are related to SEQ ID NO:96 and may have been publicly available prior to conception of the present invention. Preferably, such related polynucleotides are specifically excluded from the scope of the present invention. To list every related sequence is cumbersome. Accordingly, preferably excluded from the present invention are one or more polynucleotides comprising a nucleotide sequence described by the general formula of a-b, where a is any integer between 1 to 830 of SEQ ID NO:96, b is an integer of 15 to 844, where both a and b correspond to the positions of nucleotide residues shown in SEQ ID NO:96, and where b is greater than or equal to a+14.

[0683] Features of Protein Encoded by Gene No: 87

[0684] In specific embodiments, polypeptides of the invention comprise, or alternatively consists of, an amino acid sequence selected from the group: EQVLALLWPRFELILEMNVQSVRSTDPQRLGGLDTRPHYITRRYAEFSSALVSI NQTIPNERTMQLLGQLQVEVENFVLRVAAEFSSRKEQLVFLINNYDMMLGVL MERAADDSKEVESFQQLLNARTQEFIEELLSPPFGGLVAFVKEAEALIERGQA ERLRGEEARVTQLIRGFGSSWKSSVESLSQDVMRSFTNFRNGTSIIQG (SEQ ID NO:810), ALLKYRFFYQFLLGNERATAKEIRDEYVETLSKIYLSYYRSYL GRLMKVQYEEVAEKDDLMGVEDTAKKGFXSKPSLRSRNTIFTLGTRGSVISP TELEAPILVPHTAQR (SEQ ID NO:811), EQRYPFEALFRSQHYXLLDNSCREYLFICEFFVVSGPXAHDLFHAVMGRTLS MTLKHLDSYLADCYDAIAVFLCIHIVLRFRNIAAKEDVPALDRYW (SEQ ID NO:812), GGLDTRPHYITRRYAEFSSALVSINQ (SEQ ID NO:813), SRKEQLVFLINNYDMMLGVL (SEQ ID NO:814), ALLKYRFFYQFLLGNERATAKEIRDEYVETLSKIYLSYYRSYLGRLMKVQYE EVAEKDDLMGVEDTAKKGFXSKPSLRSRNTIFTLGTRGSVISPTELEAPILVPH TAQRXEQRYPFEALFRSQHYXLLDNSCREYLFICEFFVVSGPXAHDLFHAVM GRTLSMTLKHLDSYLADCYDAIAVFLCIHIVLRFRNIAAKRDVPALDRYWEQ VLALLWPRFELILEMNVQSVRSTDPQRLGGLDTRPHYITRRYAEFSSALVSIN QTIPNERTMQLLGQLQVEVENFVLRVAAEFSSRKEQLVFLINNYDMMLGVL MERAADDSKEVESFQQLLNARTQEFIEELLSPPFGGLVAFVKEAEALIERGQA ERLRGEEARVTQLIRGFGSSWKSSVESLSQDVMRSFTNFRNGTS (SEQ ID NO:815), PADLRAVSGTSEVGLMLLELHHKVVNVDELSPGREGSELRLGQHPVEAMIEL DQLGQRSLNDTGAISEVGETPHYILTQRFH (SEQ ID NO:816), and/or GPHPGASHSAAXEQRYPFEALFRSQHYXLLDNSCREYLFICEFFVVSGPXAHD LFHAVMGRTLSMTLKHLDSYLADCYDAIAVFLCIHIVLRFRNIAAKRDVPAL DRYWGTGACLAMATV (SEQ ID NO:817). Moreover, fragments and variants of these polypeptides (such as, for example, fragments as described herein, polypeptides at least 80%, 85%, 90%, 95%, 96%, 97%, 98%, or 99% identical to these polypeptides and polypeptides encoded by the polynucleotide which hybridizes, under stringent conditions, to the polynucleotide encoding these polypeptides) are encompassed by the invention. Antibodies that bind polypeptides of the invention are also encompassed by the invention. Polynucleotides encoding these polypeptides are also encompassed by the invention.

[0685] The translation product of this gene shares sequence homology with a suppressor of actin mutation which is thought to be important in mutation suppression.

[0686] This gene is expressed primarily in fetal liver.

[0687] Polynucleotides and polypeptides of the invention are useful as reagents for differential identification of the tissue(s) or cell type(s) present in a biological sample and for diagnosis of diseases and conditions which include, but are not limited to, hepatic or metabolic conditions. Similarly, polypeptides and antibodies directed to these polypeptides are useful in providing immunological probes for differential identification of the tissue(s) or cell type(s). For a number of disorders of the above tissues or cells, particularly of the liver or cancer, expression of this gene at significantly higher or lower levels may be routinely detected in certain tissues or cell types (e.g., hepatic, metabolic, and cancerous and wounded tissues) or bodily fluids (e.g., lymph, bile, serum, plasma, urine, synovial fluid and spinal fluid) or another tissue or cell sample taken from an individual having such a disorder, relative to the standard gene expression level, i.e., the expression level in healthy tissue or bodily fluid from an individual not having the disorder.

[0688] Predicted epitopes include those comprising a sequence shown in SEQ ID NO:335 as residues: Val-53 to Arg-60, Thr-88 to Thr-94, Ala-142 to Ser-150, Gly-188 to Glu-196, Gly-208 to Ser-214, Thr-227 to Gly-232, Lys-279 to Phe-285.

[0689] The tissue distribution in liver, combined with the homology to a highly conserved suppressor of actin mutation, suggest that the protein product of this gene is useful for diagnosis and treatment of liver disorders or cancer. Similarly, the protein product of this gene is useful for the detection and treatment of hepatoblastoma, jaundice, hepatitis, liver metabolic diseases and conditions that are attributable to the differentiation of hepatocyte progenitor cells. In addition the expression in fetus would suggest a useful role for the protein product in developmental abnormalities, fetal deficiencies, pre-natal disorders and various would-healing models and/or tissue trauma. Protein, as well as, antibodies directed against the protein may show utility as a tumor marker and/or immunotherapy targets for the above listed tissues.

[0690] Many polynucleotide sequences, such as EST sequences, are publicly available and accessible through sequence databases. Some of these sequences are related to SEQ ID NO:97 and may have been publicly available prior to conception of the present invention. Preferably, such related polynucleotides are specifically excluded from the scope of the present invention. To list every related sequence is cumbersome. Accordingly, preferably excluded from the present invention are one or more polynucleotides comprising a nucleotide sequence described by the general formula of a-b, where a is any integer between 1 to 1971 of SEQ ID NO:97, b is an integer of 15 to 1985, where both a and b correspond to the positions of nucleotide residues shown in SEQ ID NO:97, and where b is greater than or equal to a+14.

[0691] Features of Protein Encoded by Gene No: 88

[0692] In specific embodiments, polypeptides of the invention comprise, or alternatively consists of, an amino acid sequence selected from the group: YEGKEFDYVFSIDVNEGGPSYKLPYNTSDDPWLTAYNFLQKNDLNPMFLDQ VAKFIIDNTKGQMLGLGNPSFSDPFTGGGRYVPGSSGSSNTLPTADPFTGAGR YVPGSASMGTTMAGVDPFTGNSAYRSAASKTMNDIYFPKKEAVTFDQANPTQI LGKLKELNGTAPEEKKLTEDDLILLEKILSLICNSSSEKPTVQQLQILWKAINCP EDIVFPALDILRLSIKHPSVNENFCNEKEGAQFSSHLINLLNPKGKPANQLLAL RTFCNCFVGQAGQKLMMSQRESLMSHAIELKSGSNKYNI (SEQ ID NO:818), HIALATL ALNYSVCFHKD (SEQ ID NO:819), HNIEGKAQCLSLISTILEVVQDLEATFRLLVALGTLISDDSNAVQLAKS (SEQ ID NO:820), LGVDSQIKKYSSVSEPAKVSECCRFILNLL (SEQ ID NO:821), YEGKEFDYVFSIDVNEGGPSYKLPYNTSDDPWLTAYNFLQKNDLNPMFLDQ VAKFIIDNTKGQMLGLGNPSFSDPFTGGGRYVPGSSGSSNTLPTADPFTGAGR YVPGSASMGTTMAGVDPFTGNSAYRSAASKTMNIYFPKKEAVTFDQANPTQI LGKLKELNGTAPEEKKLTEDDLILLEKILSLICNSSSEKPTVQQLQILWKAINCP EDIVFPALDILRLSIKHPSVNENFCNEKEGAQFSSHLNLLNPKGKPANQLLAL RTFCNCFVGQAGQKLMMSQRESLMSHAIELKSGSKNIHIALATLALNYSVC FHKDHNIEGKAQCLSLISTILEVVQDLEATFRLLVALGTLISDDSNAVQLAKSL GVDSQIKKYSSVSEPAKVSECCRFILNLL (SEQ ID NO:822), LNLLLITQKVKCWDLGIPAFQIHLQVVVG (SEQ ID NO:823), IKHPSVNENFCNEKEGAQFSSHLINLLNP (SEQ ID NO:824), AIELKSGSNKNIHIALATLALN (SEQ ID NO:825), VQLAKSLGVDSQIKKYSSVSEPA (SEQ ID NO:826), YEGKEFDYVFSIDVNEGGPSYKLPYN (SEQ ID NO:827), AYNFLQKNDLNPMFLDQVAK FIIDNT (SEQ ID NO:828), SFSDPFTGGGRYVPG (SEQ ID NO:829), TADPFTGAGRY (SEQ ID NO:830), TTMAGVDPFTGNSAYRSAA (SEQ ID NO:831), NIYFPKKEA (SEQ ID NO:832), TFDQANPTQILGKLKELNG (SEQ ID NO:833), PEDIVFPALDILRLSIKHPSVNENFCNEKE (SEQ ID NO:834), QFSSHLINLLNPKG KPANQLLALRTFCNCFV (SEQ ID NO:835), and/or QAGQKLMMSQRESLMSHAIELKSGSN (SEQ ID NO:836). Moreover, fragments and variants of these polypeptides (such as, for example, fragments as described herein, polypeptides at least 80%, 85%, 90%, 95%, 96%, 97%, 98%, or 99% identical to these polypeptides and polypeptides encoded by the polynucleotide which hybridizes, under stringent conditions, to the polynucleotide encoding these polypeptides) are encompassed by the invention. Antibodies that bind polypeptides of the invention are also encompassed by the invention. Polynucleotides encoding these polypeptides are also encompassed by the invention.

[0693] These polypeptides share significant homology with phospholipase A2 activating protein, which is thought to be important in signal transduction (see, e.g., Wang et al., Gene 161(2):237-241 (1995)). The gene encoding the disclosed cDNA is believed to reside on chromosome 9. Accordingly, polynucleotides related to this invention are useful as a marker in linkage analysis for chromosome 9.

[0694] This gene is expressed primarily in endothelial cells, to a less extent in placenta, endometrial stromal cells, osteosarcoma, testis tumor, muscle, and infant brain that are likely to be rich in blood vessels.

[0695] Polynucleotides and polypeptides of the invention are useful as reagents for differential identification of the tissue(s) or cell type(s) present in a biological sample and for diagnosis of diseases and conditions which include, but are not limited to, disorders of the vascular system, aberrant angiogenesis, tumor angiogenesis, or related disorders of endothelial tissues. Similarly, polypeptides and antibodies directed to these polypeptides are useful in providing immunological probes for differential identification of the tissue(s) or cell type(s). For a number of disorders of the above tissues or cells, particularly of the vascular system or tumors, expression of this gene at significantly higher or lower levels may be routinely detected in certain tissues or cell types (e.g., endothelial, placenta, skeletal, neural, and cancerous and wounded tissues) or bodily fluids (e.g., lymph, amniotic fluid, serum, plasma, urine, synovial fluid and spinal fluid) or another tissue or cell sample taken from an individual having such a disorder, relative to the standard gene expression level, i.e., the expression level in healthy tissue or bodily fluid from an individual not having the disorder.

[0696] The tissue distribution of this gene in endothelial cells and several potential highly vascularized tissues, combined with the homology to the highly conserved phospholipase A2 activating protein suggest that this gene may be involved in transducing signals for endothelial cells in angiogenesis or vasculogenesis. Furthermore, the protein may show utility for the treatment, and/or prevention of embolism, thrombosis, aneurysm, atherosclerosis, microvascular disease, or stroke. Protein, as well as, antibodies directed against the protein may show utility as a tumor marker and/or immunotherapy targets for the above listed tissues.

[0697] Many polynucleotide sequences, such as EST sequences, are publicly available and accessible through sequence databases. Some of these sequences are related to SEQ ID NO:98 and may have been publicly available prior to conception of the present invention. Preferably, such related polynucleotides are specifically excluded from the scope of the present invention. To list every related sequence is cumbersome. Accordingly, preferably excluded from the present invention are one or more polynucleotides comprising a nucleotide sequence described by the general formula of a-b, where a is any integer between 1 to 1402 of SEQ ID NO:98, b is an integer of 15 to 1416, where both a and b correspond to the positions of nucleotide residues shown in SEQ ID NO:98, and where b is greater than or equal to a+14.

[0698] Features of Protein Encoded by Gene No: 89

[0699] In specific embodiments, polypeptides of the invention comprise, or alternatively consists of, an amino acid sequence selected from the group: YPNQDGDILRDQVLHEHIQRLSKVVTANHRALQIPEVYLREAPWPSAQSEIRT ISAYKTPRDKVQCILRMCSTIMNLLSLANEDSVPGADDFVPVLVFVLIKANPP CLLSTVQYISSFYASCLSGEESYWWMQFTAAVE (SEQ ID NO:837), YPNQDGDILRDQVLHEHIQRLSKVVTANHRALQIPEVYLREAPWPSAQSEIRT ISAYKTPRDKVQCILRMCSTIMNLLSLANEDSVPGADDFVPVLVFVLIKANPP CLLSTVQYISSFYASCLSGEESYWWMQFTAAVEFIKTI (SEQ ID NO:838), YPNQDGDILRDQVL (SEQ ID NO:839), EAPWPSAQSEI (SEQ ID NO:840), PVLVFVLIKANP (SEQ ID NO:845), SGEESYWWMQFTAAVEFIKTI (SEQ ID NO:841), ADDFVPVLVFVLIK ANPP (SEQ ID NO:842), YKTPRDKVQCIL (SEQ ID NO:843), and/or GADDFVPV LVFVLIK (SEQ ID NO:844). Moreover, fragments and variants of these polypeptides (such as, for example, fragments as described herein, polypeptides at least 80%, 85%, 90%, 95%, 96%, 97%, 98%, or 99% identical to these polypeptides and polypeptides encoded by the polynucleotide which hybridizes, under stringent conditions, to the polynucleotide encoding these polypeptides) are encompassed by the invention. Antibodies that bind polypeptides of the invention are also encompassed by the invention. Polynucleotides encoding these polypeptides are also encompassed by the invention.

[0700] The translation product of this gene shares sequence homology with human Ras inhibitor and yeast VPS9p which is thought to be important in Golgi vacuole transport. The gene encoding the disclosed cDNA is believed to reside on chromosome 9. Accordingly, polynucleotides related to this invention are useful as a marker in linkage analysis for chromosome 9.

[0701] This gene is expressed primarily in T cells and melanocytes.

[0702] Polynucleotides and polypeptides of the invention are useful as reagents for differential identification of the tissue(s) or cell type(s) present in a biological sample and for diagnosis of diseases and conditions which include, but are not limited to, immune, hematopoietic, or integumentary disorders, such as dysfunctions and disorders involving T cells and melanocytes. Similarly, polypeptides and antibodies directed to these polypeptides are useful in providing immunological probes for differential identification of the tissue(s) or cell type(s). For a number of disorders of the above tissues or cells, particularly of the immune system, expression of this gene at significantly higher or lower levels may be routinely detected in certain tissues or cell types (e.g., cancerous and wounded tissues) or bodily fluids (e.g., lymph, serum, plasma, urine, synovial fluid and spinal fluid) or another tissue or cell sample taken from an individual having such a disorder, relative to the standard gene expression level, i.e., the expression level in healthy tissue or bodily fluid from an individual not having the disorder.

[0703] The tissue distribution in T-cells and melanocytes, combined with the homology to a Ras inhibitor, indicates that the protein product of this gene is useful for regulating signal transduction; the diagnosis and treatment of disorders involving T cells and melanocytes, and potentially in the prevention or study of immune responses to aberrant integumentary cells and tissues, particularly in tumors and cancers, such as skin cancers. Moreover, the protein product of this gene is useful for the treatment, diagnosis, and/or prevention of various skin disorders including congenital disorders (i.e. nevi, moles, freckles, Mongolian spots, hemangiomas, port-wine syndrome), integumentary tumors (i.e. keratoses, Bowen's disease, basal cell carcinoma, squamous cell carcinoma, malignant melanoma, Paget's disease, mycosis fingoides, and Kaposi's sarcoma), injuries and inflammation of the skin (i.e. wounds, rashes, prickly heat disorder, psoriasis, dermatitis), atherosclerosis, uticaria, eczema, photosensitivity, autoimmune disorders (i.e. lupus erythematosus, vitiligo, dermatomyositis, morphea, scleroderma, pemphigoid, and pemphigus), keloids, striae, erythema, petechiae, purpura, and xanthelasma. In addition, such disorders may predispose increased susceptibility to viral and bacterial infections of the skin (i.e. cold sores, warts, chickenpox, molluscum contagiosum, herpes zoster, boils, cellulitis, erysipelas, impetigo, tinea, Athlete's foot, and ringworm). Moreover, the protein product of this gene may also be useful for the treatment or diagnosis of various connective tissue disorders such as arthritis, trauma, tendonitis, chrondomalacia and inflammation, autoimmune disorders such as rheumatoid arthritis, lupus, scleroderma, and dermatomyositis as well as dwarfism, spinal deformation, and specific joint abnormalities as well as chondrodysplasias (i.e. spondyloepiphyseal dysplasia congenita, familial osteoarthritis, Atelosteogenesis type II, metaphyseal chondrodysplasia type Schmid). Protein, as well as, antibodies directed against the protein may show utility as a tumor marker and/or immunotherapy targets for the above listed tissues.

[0704] Many polynucleotide sequences, such as EST sequences, are publicly available and accessible through sequence databases. Some of these sequences are related to SEQ ID NO:99 and may have been publicly available prior to conception of the present invention. Preferably, such related polynucleotides are specifically excluded from the scope of the present invention. To list every related sequence is cumbersome. Accordingly, preferably excluded from the present invention are one or more polynucleotides comprising a nucleotide sequence described by the general formula of a-b, where a is any integer between 1 to 1746 of SEQ ID NO:99, b is an integer of 15 to 1760, where both a and b correspond to the positions of nucleotide residues shown in SEQ ID NO:99, and where b is greater than or equal to a+14.

[0705] Features of Protein Encoded by Gene No: 90

[0706] The translation product of this gene shares sequence homology with neuronal olfactomedin-related ER localized protein which is thought to be important in the maintenance, growth, or differentiation of chemosensory cilia on the apical dendrites of olfactory neurons. Moreover, the protein also shares homology with the conserved human AMY protein which is thought to be a glial cell-specific transforming protein.

[0707] In specific embodiments, polypeptides of the invention comprise, or alternatively consists of, an amino acid sequence selected from the group: SARASTQPPAGQHPGPC (SEQ]ID NO:846), MPGRWRWQRDMHPARKLLSLLFLILMGTELTQD (SEQ ID NO:847), SAAPDSLLRSSKGSTRGSL (SEQ ID NO:848), AAIVIWRGKSESRIAKTPGI (SEQ ID NO:849), FRGGGTLVLPPTHTPEWLIL (SEQ ID NO:852), PLGITLPLGAPETGGGD (SEQ ID NO:850), NSARAS TQPPAGQHPGPCMPGRWRWQRD (SEQ ID NO:853), YIVQGTTSPFEMPTIPTPARHRAPHSPPAGHVATAPQALHIKPAMHTAGRHAG CPSRSQ RHNPHRLFLEPPRAALCPKGG (SEQ ID NO:854), ASNAHSWPARWLPFQVSAAQSPPPVSGAPKGSVMPKGRMSHSGVCVGGRTK VPPPLKMPGVLAIRLSLFPLQMTIAAKDPLVLPFELLSRESGAAES (SEQ ID NO:855), GRMSHSGVCVGGRTKVPPPLKMPGVLA (SEQ ID NO:856), and/or CAAETWKGSQRAGQLCALLA (SEQ ID NO:851). Moreover, fragments and variants of these polypeptides (such as, for example, fragments as described herein, polypeptides at least 80%, 85%, 90%, 95%, 96%, 97%, 98%, or 99% identical to these polypeptides and polypeptides encoded by the polynucleotide which hybridizes, under stringent conditions, to the polynucleotide encoding these polypeptides) are encompassed by the invention. Antibodies that bind polypeptides of the invention are also encompassed by the invention. Polynucleotides encoding these polypeptides are also encompassed by the invention.

[0708] The gene encoding the disclosed cDNA is believed to reside on chromosome 9. Accordingly, polynucleotides related to this invention are useful as a marker in linkage analysis for chromosome 9.

[0709] This gene is expressed in pineal gland.

[0710] Polynucleotides and polypeptides of the invention are useful as reagents for differential identification of the tissue(s) or cell type(s) present in a biological sample and for diagnosis of diseases and conditions which include, but are not limited to, neurological and endocrine disorders. Similarly, polypeptides and antibodies directed to these polypeptides are useful in providing immunological probes for differential identification of the tissue(s) or cell type(s). For a number of disorders of the above tissues or cells, particularly of the neurological or endocrine systems, expression of this gene at significantly higher or lower levels may be routinely detected in certain tissues or cell types (e.g., neural, endocrine, and cancerous and wounded tissues) or bodily fluids (e.g., lymph, serum, plasma, urine, synovial fluid and spinal fluid) or another tissue or cell sample taken from an individual having such a disorder, relative to the standard gene expression level, i.e., the expression level in healthy tissue or bodily fluid from an individual not having the disorder.

[0711] Predicted epitopes include those comprising a sequence shown in SEQ ID NO:338 as residues: Leu-20 to Ala-26, Arg-32 to Arg-39, Thr-104 to Gly-112.

[0712] The tissue distribution in pineal gland, combined with the homology to both the olfactomedin-related, and AMY proteins, indicates that the protein product of this gene is useful for maintenance, growth, or differentiation of neuron cells in pineal gland. Therefore, the protein product of this gene may be useful for the diagnosis and treatment of neurological disorders in pineal gland. Moreover, the protein product of this gene is useful for the detection/treatment of neurodegenerative disease states, behavioral disorders, or inflammatory conditions such as Alzheimer's Disease, Parkinson's Disease, Huntington's Disease, Tourette's Syndrome, meningitis, encephalitis, demyelinating diseases, peripheral neuropathies, neoplasia, trauma, congenital malformations, spinal cord injuries, ischemia and infarction, aneurysms, hemorrhages, schizophrenia, mania, dementia, paranoia, obsessive compulsive disorder, panic disorder, learning disabilities, ALS, psychoses, autism, and altered behaviors, including disorders in feeding, sleep patterns, balance, and perception. In addition, elevated expression of this gene product in regions of the brain indicates that it plays a role in normal neural function. Potentially, this gene product is involved in synapse formation, neurotransmission, learning, cognition, homeostasis, or neuronal differentiation or survival. Moreover, the gene or gene product may also play a role in the treatment and/or detection of developmental disorders associated with the developing embryo, sexually-linked disorders, or disorders of the cardiovascular system. Protein, as well as, antibodies directed against the protein may show utility as a tumor marker and/or immunotherapy targets for the above listed tissues.

[0713] Many polynucleotide sequences, such as EST sequences, are publicly available and accessible through sequence databases. Some of these sequences are related to SEQ ID NO:100 and may have been publicly available prior to conception of the present invention. Preferably, such related polynucleotides are specifically excluded from the scope of the present invention. To list every related sequence is cumbersome. Accordingly, preferably excluded from the present invention are one or more polynucleotides comprising a nucleotide sequence described by the general formula of a-b, where a is any integer between 1 to 585 of SEQ ID NO:100, b is an integer of 15 to 599, where both a and b correspond to the positions of nucleotide residues shown in SEQ ID NO:100, and where b is greater than or equal to a+14.

[0714] Features of Protein Encoded by Gene No: 91

[0715] This gene is expressed primarily in prostate and apoptotic T cells.

[0716] Polynucleotides and polypeptides of the invention as useful as reagents for differential identification of the tissue(s) or cell type(s) present in a biological sample and for diagnosis of diseases and conditions which include, but are not limited to, reproductive, immune, or hematopoietic disorders, particularly prostate disease and T cell dysfunction. Similarly, polypeptides and antibodies directed to these polypeptides are useful in providing immunological probes for differential identification of the tissue(s) or cell type(s). For a number of disorders of the above tissues or cells, particularly of the prostate cancer, expression of this gene at significantly higher or lower levels may be routinely detected in certain tissues or cell types (e.g. prostate, immune, cancerous and wounded tissues) or bodily fluids (e.g., lymph, seminal fluid, serum, plasma, urine, synovial fluid and spinal fluid) or another tissue or cell sample taken from an individual having such a disorder, relative to the standard gene expression level, i.e., the expression level in healthy tissue or bodily fluid from an individual not having the disorder.

[0717] The tissue distribution in prostate and T-cells indicates that the protein product of this gene is useful for the detection of abnormal activity in prostate and T cells, such as proliferative conditions of the prostate, or possibly treatment of this abnormality. This gene product may be involved in the regulation of cytokine production, antigen presentation, or other processes that may also suggest a usefulness in the treatment of cancer (e.g. by boosting immune responses). Since the gene is expressed in cells of lymphoid origin, the natural gene product may be involved in immune functions. Therefore it may be also used as an agent for immunological disorders including arthritis, asthma, immunodeficiency diseases such as AIDS, leukemia, rheumatoid arthritis, granulomatous disease, inflammatory bowel disease, sepsis, acne, neutropenia, neutrophilia, psoriasis, hypersensitivities, such as T-cell mediated cytotoxicity; immune reactions to transplanted organs and tissues, such as host-versus-graft and graft-versus-host diseases, or autoimmunity disorders, such as autoimmune infertility, lens tissue injury, demyelination, systemic lupus erythematosis, drug induced hemolytic anemia, rheumatoid arthritis, Sjogren's disease, scleroderma and tissues. In addition, this gene product may have commercial utility in the expansion of stem cells and committed progenitors of various blood lineages, and in the differentiation and/or proliferation of various cell types. Protein, as well as, antibodies directed against the protein may show utility as a tumor marker and/or immunotherapy targets for the above listed tissues.

[0718] Many polynucleotide sequences, such as EST sequences, are publicly available and accessible through sequence databases. Some of these sequences are related to SEQ ID NO:101 and may have been publicly available prior to conception of the present invention. Preferably, such related polynucleotides are specifically excluded from the scope of the present invention. To list every related sequence is cumbersome. Accordingly, preferably excluded from the present invention are one or more polynucleotides comprising a nucleotide sequence described by the general formula of a-b, where a is any integer between 1 to 770 of SEQ ID NO:101, b is an integer of 15 to 784, where both a and b correspond to the positions of nucleotide residues shown in SEQ ID NO:101, and where b is greater than or equal to a+14.

[0719] Features of Protein Encoded by Gene No: 92

[0720] The gene encoding the disclosed cDNA is believed to reside on chromosome 19. Accordingly, polynucleotides related to this invention are useful as a marker in linkage analysis for chromosome 19.

[0721] This gene is expressed primarily in prostate, and to a lesser extent, in smooth muscle cells, fibroblasts, and placenta.

[0722] Polynucleotides and polypeptides of the invention are useful as reagents for differential identification of the tissue(s) or cell type(s) present in a biological sample and for diagnosis of diseases and conditions which include, but are not limited to, disorders in prostate or vascular tissues. Similarly, polypeptides and antibodies directed to these polypeptides are useful in providing immunological probes for differential identification of the tissue(s) or cell type(s). For a number of disorders of the above tissues or cells, particularly of the prostate or vascular system, expression of this gene at significantly higher or lower levels may be routinely detected in certain tissues or cell types (e.g. prostate, musculoskeletal, cancerous and wounded tissues) or bodily fluids (e.g., lymph, seminal fluid, serum, plasma, urine, synovial fluid and spinal fluid) or another tissue or cell sample taken from an individual having such a disorder, relative to the standard gene expression level, i.e., the expression level in healthy tissue or bodily fluid from an individual not having the disorder.

[0723] Predicted epitopes include those comprising a sequence shown in SEQ ID NO:340 as residues: Ser-38 to Lys-46.

[0724] The tissue distribution in prostate and smooth muscle indicates that the protein product of this gene is useful for regulating the function of prostate or highly vascularized tissues, such as the placenta. Similarly, the protein product of this gene may be useful in the treatment and/or detection of vascular disorders which include, but are not limited to, stroke, embolism, thrombosis, aneurysm, microvascular disease, or atherosclerosis. The protein may also show utility in the treatment or detection of proliferative disorders of the prostate or male reproductive system. Protein, as well as, antibodies directed against the protein may show utility as a tumor marker and/or immunotherapy targets for the above listed tissues.

[0725] Many polynucleotide sequences, such as EST sequences, are publicly available and accessible through sequence databases. Some of these sequences are related to SEQ ID NO:102 and may have been publicly available prior to conception of the present invention. Preferably, such related polynucleotides are specifically excluded from the scope of the present invention. To list every related sequence is cumbersome. Accordingly, preferably excluded from the present invention are one or more polynucleotides comprising a nucleotide sequence described by the general formula of a-b, where a is any integer between 1 to 390 of SEQ ID NO:102, b is an integer of 15 to 404, where both a and b correspond to the positions of nucleotide residues shown in SEQ ID NO:102, and where b is greater than or equal to a+14.

[0726] Features of Protein Encoded by Gene No: 93

[0727] In specific embodiments, polypeptides of the invention comprise, or alternatively consists of, the following amino acid sequence: GHQTAPETPSRSD (SEQ ID NO:857). Moreover, fragments and variants of this polypeptide (such as, for example, fragments as described herein, polypeptides at least 80%, 85%, 90%, 95%, 96%, 97%, 98%, or 99% identical to these polypeptides and polypeptides encoded by the polynucleotide which hybridize, under stringent conditions, to the polynucleotide encoding this polypeptide are encompassed by the invention. Antibodies that bind polypeptides of the invention are also encompassed by the invention. Polynucleotides encoding this polypeptide are also encompassed by the invention.

[0728] This gene is expressed primarily in embryos and fetal tissues, and to a lesser extent, in proliferative tissues.

[0729] Polynucleotides and polypeptides of the invention are useful as reagents for differential identification of the tissue(s) or cell type(s) present in a biological sample and for diagnosis of diseases and conditions which include, but are not limited to, disorders in embryonic development and cell proliferation. Similarly, polypeptides and antibodies directed to these polypeptides are useful in providing immunological probes for differential identification of the tissue(s) or cell type(s). For a number of disorders of the above tissues or cells, particularly of the embryonic tissues and proliferative cells, expression of this gene at significantly higher or lower levels may be routinely detected in certain tissues or cell types (e.g., developmental, differentiating, and cancerous and wounded tissues) or bodily fluids (e.g., lymph, amniotic fluid, serum, plasma, urine, synovial fluid and spinal fluid) or another tissue or cell sample taken from an individual having such a disorder, relative to the standard gene expression level, i.e., the expression level in healthy tissue or bodily fluid from an individual not having the disorder.

[0730] The tissue distribution in embryonic and fetal tissues indicates that the protein product of this gene is useful for the diagnosis or treatment of abnormalities in developing and proliferative cells and organs. Similarly, expression within embryonic tissue and other cellular sources marked by proliferating cells indicates that this protein may play a role in the regulation of cellular division, and may show utility in the diagnosis and treatment of cancer and other proliferative disorders. Similarly, developmental tissues rely on decisions involving cell differentiation and/or apoptosis in pattern formation. Thus, this protein may also be involved in apoptosis or tissue differentiation and could again be useful in cancer therapy. Protein, as well as, antibodies directed against the protein may show utility as a tumor marker and/or immunotherapy targets for the above listed tissues.

[0731] Many polynucleotide sequences, such as EST sequences, are publicly available and accessible through sequence databases. Some of these sequences are related to SEQ ID NO:103 and may have been publicly available prior to conception of the present invention. Preferably, such related polynucleotides are specifically excluded from the scope of the present invention. To list every related sequence is cumbersome. Accordingly, preferably excluded from the present invention are one or more polynucleotides comprising a nucleotide sequence described by the general formula of a-b, where a is any integer between 1 to 2204 of SEQ ID NO:103, b is an integer of 15 to 2218, where both a and b correspond to the positions of nucleotide residues shown in SEQ ID NO:103, and where b is greater than or equal to a+14.

[0732] Features of Protein Encoded by Gene No: 94

[0733] The translation product of this gene shares sequence homology with a transformation related protein which is thought to be important in transformation.

[0734] In specific embodiments, polypeptides of the invention comprise, or alternatively consists of, the following amino acid sequence: SQTDR (SEQ ID NO:858). Polynucleotides encoding this polypeptides are also encompassed by the invention. Antibodies that bind polypeptides of the invention are also encompassed by the invention.

[0735] The gene encoding the disclosed cDNA is believed to reside on chromosome 2. Accordingly, polynucleotides related to this invention are useful as a marker in linkage analysis for chromosome 2.

[0736] This gene is expressed primarily in female reproductive tissues, i.e., breast cancer cells, placenta, and ovary, and to a lesser extent, in fetal lung.

[0737] Polynucleotides and polypeptides of the invention are useful as reagents for differential identification of the tissue(s) or cell type(s) present in a biological sample and for diagnosis of diseases and conditions which include, but are not limited to, cancer or dysfunction of reproductive tissues, in addition to pulmonary or developmental disorders. Similarly, polypeptides and antibodies directed to these polypeptides are useful in providing immunological probes for differential identification of the tissue(s) or cell type(s). For a number of disorders of the above tissues or cells, particularly of the reproduction system, expression of this gene at significantly higher or lower levels may be routinely detected in certain tissues or cell types (e.g., pulmonary, reproductive, ovarian, breast, placental, developmental, and cancerous and wounded tissues) or bodily fluids (e.g., lymph, pulmonary surfactant or sputum, amniotic fluid, serum, plasma, urine, synovial fluid and spinal fluid) or another tissue or cell sample taken from an individual having such a disorder, relative to the standard gene expression level, i.e., the expression level in healthy tissue or bodily fluid from an individual not having the disorder.

[0738] Predicted epitopes include those comprising a sequence shown in SEQ ID NO:342 as residues: Ser-50 to Pro-61.

[0739] The tissue distribution in female reproductive tissues, combined with the homology to the transformation related protein, indicates that the protein product of this gene is useful for the diagnosis and treatment of conditions caused by transformation, i.e. tumorigenesis in reproductive organs, (e.g. breast, placenta, and ovary). Similarly, expression within fetal tissue and other cellular sources marked by proliferating cells indicates that this protein may play a role in the regulation of cellular division, and may show utility in the diagnosis and treatment of cancer and other proliferative disorders. Similarly, developmental tissues rely on decisions involving cell differentiation and/or apoptosis in pattern formation. Thus this protein may also be involved in apoptosis or tissue differentiation and could again be useful in cancer therapy. Protein may also be useful in the treatment or detection of a variety of pulmonary conditions, including, but not limited to emphysema, ARDS, cystic fibrosis, asthma, etc. Protein, as well as, antibodies directed against the protein may show utility as a tumor marker and/or immunotherapy targets for the above listed tissues.

[0740] Many polynucleotide sequences, such as EST sequences, are publicly available and accessible through sequence databases. Some of these sequences are related to SEQ ID NO:104 and may have been publicly available prior to conception of the present invention. Preferably, such related polynucleotides are specifically excluded from the scope of the present invention. To list every related sequence is cumbersome. Accordingly, preferably excluded from the present invention are one or more polynucleotides comprising a nucleotide sequence described by the general formula of a-b, where a is any integer between 1 to 1337 of SEQ ID NO:104, b is an integer of 15 to 1351, where both a and b correspond to the positions of nucleotide residues shown in SEQ ID NO:104, and where b is greater than or equal to a+14.

[0741] Features of Protein Encoded by Gene No: 95

[0742] In specific embodiments, polypeptides of the invention comprise, or alternatively consist of, the following amino acid sequences: NIYFKEKRKRGGAKMAGAIIEN (SEQ ID NO:859), VYLCAYTSTINVTVTTANAKLINMCCLVDSNTRSCVVIDEGIFRSAEQFLIKFR NKQSTIFPRFTWELHSIGLVFSIVFMGWCIQEHQSKDIQIPHPIDACEKGTVHL DCDAAPFPMAFRYLTNDEEDDSHGSAGQGDKHEEIEPKN (SEQ ID NO:860), KMPCRMSPNSSIQVQSNPMENHSTGILIKVMEIPRAKMTFSRSTGGRDIMVILL QYHTIMMKMLGVRKVFMANHTLVKPPFWWIPTNRISFISPIPTLIFFFSFTGSR MFKR (SEQ ID NO:861), TTKSEKMQKSPWTFPWLTVMTHLLSGLKWPMKEYHGNSNAPSHLPRLQSM RAVTMNVMSFLSWKLGLWPISFTF (SEQ ID NO:862), IKFRNKQSTIFPRFTWELHSIGLVFSIVFMG (SEQ ID NO:863), SSIQVQSNPMENHSTGILIKVMEIPRAKM (SEQ ID NO:864), and/or LGVRKVFMANHTLVKPPFWWIPTNRISFISPIP (SEQ ID NO:865). Moreover, fragments and variants of these polypeptides (such as, for example, fragments as described herein, polypeptides at least 80%, 85%, 90%, 95%, 96%, 97%, 98%, or 99% identical to these polypeptides and polypeptides encoded by the polynucleotide which hybridizes, under stringent conditions, to the polynucleotide encoding these polypeptides) are encompassed by the invention. Antibodies that bind polypeptides of the invention are also encompassed by the invention. Polynucleotides encoding these polypeptides are also encompassed by the invention.

[0743] Polynucleotides encoding these polypeptides are also encompassed by the invention. The gene encoding the disclosed cDNA is believed to reside on chromosome 1. Accordingly, polynucleotides related to this invention are useful as a marker in linkage analysis for chromosome 1.

[0744] This gene is expressed primarily in testes, rhabdomyosarcoma, infant brain and to a lesser extent in some tumors and highly vascularized tissues.

[0745] Polynucleotides and polypeptides of the invention are useful as reagents for differential identification of the tissue(s) or cell type(s) present in a biological sample and for diagnosis of diseases and conditions which include, but are not limited to, tumorigenesis, abnormal angiogenesis, reproductive, vascular, and/or neurological disorders. Similarly, polypeptides and antibodies directed to these polypeptides are useful in providing immunological probes for differential identification of the tissue(s) or cell type(s). For a number of disorders of the above tissues or cells, particularly of the tumor tissues or vascular tissues, expression of this gene at significantly higher or lower levels may be routinely detected in certain tissues or cell types (e.g., muscle, neural, developmental, vascular, reproductive, testicular, and cancerous and wounded tissues) or bodily fluids (e.g., lymph, serum, seminal fluid, amniotic fluid, plasma, urine, synovial fluid and spinal fluid) or another tissue or cell sample taken from an individual having such a disorder, relative to the standard gene expression level, i.e., the expression level in healthy tissue or bodily fluid from an individual not having the disorder.

[0746] Predicted epitopes include those comprising a sequence shown in SEQ ID NO:343 as residues: Arg-46 to Trp-54, Pro-60 to Ile-69, Asn-116 to Ala-122, Arg-147 to Lys-153, Ser-158 to Glu-170, Ile-399 to Ser-405, Pro-486 to Met-499, Pro-502 to Asp-508.

[0747] The tissue distribution in infant brain indicates that the protein product of this gene is useful for a range of disease states including treatment of tumor or vascular disorders and the treatment of neurological disorders such as Alzheimer's Disease, Parkinson's Disease, Huntington's Disease, schizophrenia, mania, dementia, paranoia, obsessive compulsive disorder and panic disorder. Moreover, expression within vascular tissues indicates that the protein product of this gene is useful in the treatment and/or detection of a variety of vascular conditions, which include but are not limited to emphysema, atherosclerosis, thrombosis, microvascular disease, stroke or aneurysm. Protein, as well as, antibodies directed against the protein may show utility as a tumor marker and/or immunotherapy targets for the above listed tissues.

[0748] Many polynucleotide sequences, such as EST sequences, are publicly available and accessible through sequence databases. Some of these sequences are related to SEQ ID NO:105 and may have been publicly available prior to conception of the present invention. Preferably, such related polynucleotides are specifically excluded from the scope of the present invention. To list every related sequence is cumbersome. Accordingly, preferably excluded from the present invention are one or more polynucleotides comprising a nucleotide sequence described by the general formula of a-b, where a is any integer between 1 to 2052 of SEQ ID NO:105, b is an integer of 15 to 2066, where both a and b correspond to the positions of nucleotide residues shown in SEQ ID NO:105, and where b is greater than or equal to a+14.

[0749] Features of Protein Encoded by Gene No: 96

[0750] The translation product of this gene is homologous to the Clostridium perfringens enterotoxin (CPE) receptor gene product and shares sequence homology with a human ORF specific to prostate and a glycoprotein specific to oligodendrocytes, both of which are tissue specific proteins. See e.g., Katahira et al. J Cell Biol. 136(6):1239-1247 (1997). PMID: 9087440; UI: 97242441.

[0751] In specific embodiments, polypeptides of the invention comprise, or alternatively consist of, the following amino acid sequences: TMASMGLQV (SEQ ID NO:866), KSWMMLWAVQDTGTITIRPANRNTTPATIMVLALASSSRQLVHLPPTTDSST PRAATMMLMMTRARAACRSCGSASSESYTLHCIWPVLCTTQFIHPSQMVCE VTMLLPMKAVTRHMGSAQHSMTASQPRTASAMPITCSPMEAIVQRPRELRT WKAEGIRLWGP (SEQ ID NO:867), LQVMGIALAVLGWLAVMLCCALPMWRVT (SEQ ID NO:868), SNIVTSQTIWEGLWMNCVVQST (SEQ ID NO:869), QMQCKVYDSLLALPQDLQ (SEQ ID NO:870), KCTNCLEDESAKAKTMIV (SEQ ID NO:871), GVVFLLAGLMVIVPVSWTAHNIIQDFYNPLVA (SEQ ID NO:872), and/or CCNCPPRTDKPY (SEQ ID NO:873). Moreover, fragments and variants of these polypeptides (such as, for example, fragments as described herein, polypeptides at least 80%, 85%, 90%, 95%, 96%, 97%, 98%, or 99% identical to these polypeptides and polypeptides encoded by the polynucleotide which hybridizes, under stringent conditions, to the polynucleotide encoding these polypeptides) are encompassed by the invention. Antibodies that bind polypeptides of the invention are also encompassed by the invention. Polynucleotides encoding these polypeptides are also encompassed by the invention.

[0752] The gene encoding the disclosed cDNA is believed to reside on chromosome 7. Accordingly, polynucleotides related to this invention are useful as a marker in linkage analysis for chromosome 7.

[0753] This gene is expressed primarily in pancreas tumor and ulcerative colitis, and to a lesser extent in several tumors and normal tissues.

[0754] Polynucleotides and polypeptides of the invention are useful as reagents for differential identification of the tissue(s) or cell type(s) present in a biological sample and for diagnosis of diseases and conditions which include, but are not limited to, metabolic, gastrointestinal, or proliferative disorders, such as pancreatic disorders, ulcerative colitis, tumors and food poisoning. Similarly, polypeptides and antibodies directed to these polypeptides are useful in providing immunological probes for differential identification of the tissue(s) or cell type(s). For a number of disorders of the above tissues or cells, particularly of the digestive system or tumorigenic system, expression of this gene at significantly higher or lower levels may be routinely detected in certain tissues or cell types (e.g., metabolic, gastrointestinal, pancreatic, and cancerous and wounded tissues) or bodily fluids (e.g., lymph, bile, serum, plasma, urine, synovial fluid and spinal fluid) or another tissue or cell sample taken from an individual having such a disorder, relative to the standard gene expression level, i.e., the expression level in healthy tissue or bodily fluid from an individual not having the disorder.

[0755] Predicted epitopes include those comprising a sequence shown in SEQ ID NO:344 as residues: Gly-147 to Met-152, Cys-177 to Lys-188.

[0756] The tissue distribution in pancreas, combined with the homology to a prostate and oligodendrocyte-specific protein, indicates that the protein product of this gene is useful as a marker for the diagnosis or treatment of disorders in pancreas, ulcerative colitis, and tumors. Furthermore, identity to the human receptor for Clostridium perfringenes enterotoxin indicates that the soluble portion of this receptor could be used in the treatment of food poisoning associated with Clostridia perfringens by blocking the activity of the perfringens enterotoxin. Protein, as well as, antibodies directed against the protein may show utility as a tumor marker and/or immunotherapy targets for the above listed tissues.

[0757] Many polynucleotide sequences, such as EST sequences, are publicly available and accessible through sequence databases. Some of these sequences are related to SEQ ID NO:106 and may have been publicly available prior to conception of the present invention. Preferably, such related polynucleotides are specifically excluded from the scope of the present invention. To list every related sequence is cumbersome. Accordingly, preferably excluded from the present invention are one or more polynucleotides comprising a nucleotide sequence described by the general formula of a-b, where a is any integer between 1 to 1691 of SEQ ID NO:106, b is an integer of 15 to 1705, where both a and b correspond to the positions of nucleotide residues shown in SEQ ID NO:106, and where b is greater than or equal to a+14.

[0758] Features of Protein Encoded by Gene No: 97

[0759] The translation product of this gene shares sequence homology with an ATPase from Saccharomyces cerevisiae which is thought to be important in metabolism (See Genbank Accession No.g|181253).

[0760] In specific embodiments, polypeptides of the invention comprise, or alternatively consist of, the following amino acid sequences: PFTAIAGSEIFSLE (SEQ ID NO:874), SKTEALTQAFR (SEQ ID NO:875), VVHTVSLHEIDVINSRTQGFLALF (SEQ ID NO:876), PGVLFIDEVHMLDIE (SEQ ID NO:877), AGIRQRFSARLWQLVSIMATVTATTKVPEIRDVTRIERIGAHSHIRGLGLDDAL EPRQASQGMVGQLAARRAAGVVLEMIREGKIAGRAVLIAGQPGTGKTAIAM GMAQALGPDTPFTAIAGSEIFSLEMSKTEALTQAFRRSIGVRIKEETEIIEGEVV EIQIDRPATGTGSKVGKLTLKTTEMETIYDLGTKMIXSLTKDKVQAGDVITID KATGKISKLGRSFTRARELRRYGLPDQVRAVPRWGPETQGGGAHRVPARD RRHQLSHPGLPGALLR (SEQ ID NO:878), SPSTRRRARSPSWAAPSHAPANYDAMGSQTKFVQCPDGELQKRKEVVHTVS LHEIDVINSRTQGFLALFSGDTGEIKSEVREQINAKVAEWREEGKAEIIPGVLFI DEVHMLDIESFSFLNRALESDMAPVQQVYGDAVRALVAGAPDSRDATVGGL VPNSCSPGDPLVLERPPPRWXS (SEQ ID NO:879), WIPRAAG]RHEATNRGITRIRGTSYQSPHGIPIDLLDRRHVTLQGPVEEGEALD VQHVDLVDEQHSRDDLRLALLAPLSHLGIDLLTDF (SEQ ID NO:880), YDAMGSQTKFVQCPDGELQKRKEVVHTVSL (SEQ ID NO:881), KAEIIPGVLFIDEVHMLDIESFSFLNRALES (SEQ ID NO:882), and/or EATNRGITRIRGTSYQSPHGIPIDLLDR (SEQ ID NO:883). Moreover, fragments and variants of these polypeptides (such as, for example, fragments as described herein, polypeptides at least 80%, 85%, 90%, 95%, 96%, 97%, 98%, or 99% identical to these polypeptides and polypeptides encoded by the polynucleotide which hybridizes, under stringent conditions, to the polynucleotide encoding these polypeptides) are encompassed by the invention. Antibodies that bind polypeptides of the invention are also encompassed by the invention. Polynucleotides encoding these polypeptides are also encompassed by the invention.

[0761] This gene is expressed primarily in testes and several hematopoietic cells.

[0762] Polynucleotides and polypeptides of the invention are useful as reagents for differential identification of the tissue(s) or cell type(s) present in a biological sample and for diagnosis of diseases and conditions which include, but are not limited to, reproductive, immune, or hematopoietic disorders, particularly male infertility and leukemia. Similarly, polypeptides and antibodies directed to these polypeptides are useful in providing immunological probes for differential identification of the tissue(s) or cell type(s). For a number of disorders of the above tissues or cells, particularly of the hematopoietic system, expression of this gene at significantly higher or lower levels may be routinely detected in certain tissues or cell types (e.g., reproductive, immune, hematopoietic, testicular, and cancerous and wounded tissues) or bodily fluids (e.g., lymph, seminal fluid, serum, plasma, urine, synovial fluid and spinal fluid) or another tissue or cell sample taken from an individual having such a disorder, relative to the standard gene expression level, i.e., the expression level in healthy tissue or bodily fluid from an individual not having the disorder.

[0763] The tissue distribution in testes and hematopoietic cells, combined with the homology to ATPases, indicates that the protein product of this gene is useful as a marker for the diagnosis and treatment of leukemia and other hematopoietic disorders. The protein may also show utility as a contraceptive, or for the treatment and/or detection of aberrant testicular function. The secreted protein can also be used to determine biological activity, to raise antibodies, as tissue markers, to isolate cognate ligands or receptors, to identify agents that modulate their interactions and as nutritional supplements. It may also have a very wide range of biological activities. Typical of these are cytokine, cell proliferation/differentiation modulating activity or induction of other cytokines; immunostimulating/immunosuppressant activities (e.g. for treating human immunodeficiency virus infection, cancer, autoimmune diseases and allergy); regulation of hematopoiesis (e.g. for treating anemia or as adjunct to chemotherapy); stimulation or growth of bone, cartilage, tendons, ligaments and/or nerves (e.g. for treating wounds); stimulation of follicle stimulating hormone (for control of fertility); chemotactic and chemokinetic activities (e.g. for treating infections, tumors); hemostatic or thrombolytic activity (e.g. for treating hemophilia, cardiac infarction etc.); anti-inflammatory activity (e.g. for treating septic shock, Crohn's disease); as antimicrobials; for treating psoriasis or other hyperproliferative diseases; for regulation of metabolism, and behavior. Also contemplated is the use of the corresponding nucleic acid in gene therapy procedures. Protein, as well as, antibodies directed against the protein may show utility as a tumor marker and/or immunotherapy targets for the above listed tissues.

[0764] Many polynucleotide sequences, such as EST sequences, are publicly available and accessible through sequence databases. Somre of these sequences are related to SEQ ID NO:107 and may have been publicly available prior to conception of the present invention. Preferably, such related polynucleotides are specifically excluded from the scope of the present invention. To list every related sequence is cumbersome. Accordingly, preferably excluded from the present invention are one or more polynucleotides comprising a nucleotide sequence described by the general formula of a-b, where a is any integer between 1 to 1153 of SEQ ID NO:107, b is an integer of 15 to 1167, where both a and b correspond to the positions of nucleotide residues shown in SEQ ID NO:107, and where b is greater than or equal to a+14.

[0765] Features of Protein Encoded by Gene No: 98

[0766] In specific embodiments, polypeptides of the invention comprise, or alternatively consists of, an amino acid sequence selected from the group: MRSARPSLGCLPSWAFSQALNI (SEQ ID NO:884), LLGLKGLAPAEISAVCEGNFN (SEQ ID NO:885), VAHGLAWSYYIGYLRLILPELQARIR (SEQ ID NO:886), TYNQHYNNLLRGAVSQRC (SEQ ID NO:887), ILLPLDCGVPDNLS MADPNIRFLDKLPQQTGDRAGIKDRVYSN (SEQ ID NO:888), SIYELLENGQRAGTCVLEYATPLQTLFAMSQYSQAGFSGEDRLEQ (SEQ ID NO:889), AKLFCRTLEDILADAPESQNNCRLIAYQEPADDSSFSLSQEVLRHLRQEEKEE VTVGSLKTSAVPSTSTMSQEPELLISGMEKPLPLRTDFS (SEQ ID NO:890), LRLHSEKLPLAARSAGPSLLVIIQSSQCPGGRRYRGSYWRTVRACLGCPLRRG ALLLLSIYFYYSLPNAVGPPFTW (SEQ ID NO:892), VWLTPTFASWINCPSRPVTVLASRIGFTATASMSFWRTGSGRAPVSWSTPPPC RLCLPCHNTVKLALAGRIGLSRPNSSAGHLRTSWQMPLSLRTTAASLPTRNLQ MTAASRCPRRFSGTCGRRKRKRLLWAA (SEQ ID NO:893), GVCQVSFMGPSRPTPHPSPLPLPGDAELSQWYQQAPSPSGSWSCSIIGEPQQK NGEEEEAEFGVLNPPAPTLQHQGCYGLSCRATLA (SEQ ID NO:894), and/or LLGLKGLAPAEISAVCEKGNFNVAHGLAWSYYIGYLRLILPEL (SEQ ID NO:891). Moreover, fragments and variants of these polypeptides (such as, for example, fragments as described herein, polypeptides at least 80%, 85%, 90%, 95%, 96%, 97%, 98%, or 99% identical to these polypeptides and polypeptides encoded by the polynucleotide which hybridizes, under stringent conditions, to the polynucleotide encoding these polypeptides) are encompassed by the invention. Antibodies that bind polypeptides of the invention are also encompassed by the invention. Polynucleotides encoding these polypeptides are also encompassed by the invention.

[0767] This gene is expressed primarily in prostate BPH, and to a lesser extent, in bone marrow.

[0768] Polynucleotides and polypeptides of the invention are useful as reagents for differential identification of the tissue(s) or cell type(s) present in a biological sample and for diagnosis of diseases and conditions which include, but are not limited to, reproductive, hematopoietic, or immune disorders, particularly benign prostatic hypertrophy, prostate cancer, or leukemia. Similarly, polypeptides and antibodies directed to these polypeptides are useful in providing immunological probes for differential identification of the tissue(s) or cell type(s). For a number of disorders of the above tissues or cells, particularly of the male urinary system, expression of this gene at significantly higher or lower levels may be routinely detected in certain tissues or cell types (e.g., reproductive, hematopoietic, immune, prostatic, and cancerous and wounded tissues) or bodily fluids (e.g., lymph, seminal fluid, serum, plasma, urine, synovial fluid and spinal fluid) or another tissue or cell sample taken from an individual having such a disorder, relative to the standard gene expression level, i.e., the expression level in healthy tissue or bodily fluid from an individual not having the disorder.

[0769] Predicted epitopes include those comprising a sequence shown in SEQ ID NO:346 as residues: Ile-60 to Asn-69, Leu-106 to Asp-112, Glu-130 to Gly-136, Phe-160 to Glu-167, Pro-184 to Cys-190, Glu-197 to Ser-202, Arg-215 to Glu-221, Thr-237 to Pro-242.

[0770] The tissue distribution in prostate tissue indicates that the protein product of this gene is useful for the diagnosis or treatment of reproductive disorders, such as benign prostatic hypertrophy or prostate cancer. Moreover, the protein product of this gene is useful for the treatment and diagnosis of hematopoetic related disorders such as anemia, pancytopenia, leukopenia, thrombocytopenia or leukemia since stromal cells are important in the production of cells of hematopoietic lineages. The uses include bone marrow cell ex vivo culture, bone marrow transplantation, bone marrow reconstitution, radiotherapy or chemotherapy of neoplasia. The gene product may also be involved in lymphopoiesis, therefore, it can be used in immune disorders such as infection, inflammation, allergy, immunodeficiency etc. In addition, this gene product may have commercial utility in the expansion of stem cells and committed progenitors of various blood lineages, and in the differentiation and/or proliferation of various cell types. Protein, as well as, antibodies directed against the protein may show utility as a tumor marker and/or immunotherapy targets for the above listed tissues.

[0771] Many polynucleotide sequences, such as EST sequences, are publicly available and accessible through sequence databases. Some of these sequences are related to SEQ ID NO:108 and may have been publicly available prior to conception of the present invention. Preferably, such related polynucleotides are specifically excluded from the scope of the present invention. To list every related sequence is cumbersome. Accordingly, preferably excluded from the present invention are one or more polynucleotides comprising a nucleotide sequence described by the general formula of a-b, where a is any integer between 1 to 1893 of SEQ ID NO:108, b is an integer of 15 to 1907, where both a and b correspond to the positions of nucleotide residues shown in SEQ ID NO:108, and where b is greater than or equal to a+14.

[0772] Features of Protein Encoded by Gene No: 99

[0773] The gene encoding the disclosed cDNA is believed to reside on chromosome 15. Accordingly, polynucleotides related to this invention are useful as a marker in linkage analysis for chromosome 15.

[0774] This gene is expressed primarily in salivary gland.

[0775] Polynucleotides and polypeptides of the invention are useful as reagents for differential identification of the tissue(s) or cell type(s) present in a biological sample and for diagnosis of diseases and conditions which include, but are not limited to, metabolic disorders, particularly of the salivary gland. Similarly, polypeptides and antibodies directed to these polypeptides are useful in providing immunological probes for differential identification of the tissue(s) or cell type(s). For a number of disorders of the above tissues or cells, particularly of glandular tissues, expression of this gene at significantly higher or lower levels may be routinely detected in certain tissues or cell types (e.g. salivary gland, cancerous and wounded tissues) or bodily fluids (e.g., lymph, serum, chyme, plasma, urine, synovial fluid and spinal fluid) or another tissue or cell sample taken from an individual having such a disorder, relative to the standard gene expression level, i.e., the expression level in healthy tissue or bodily fluid from an individual not having the disorder.

[0776] The tissue distribution in salivary glands indicates that the protein product of this gene is useful for the treatment and/or detection of disorders of or injuries to the salivary gland or other glandular tissue. Protein, as well as, antibodies directed against the protein may show utility as a tumor marker and/or immunotherapy targets for the above listed tissues.

[0777] Many polynucleotide sequences, such as EST sequences, are publicly available and accessible through sequence databases. Some of these sequences are related to SEQ ID NO:109 and may have been publicly available prior to conception of the present invention. Preferably, such related polynucleotides are specifically excluded from the scope of the present invention. To list every related sequence is cumbersome. Accordingly, preferably excluded from the present invention are one or more polynucleotides comprising a nucleotide sequence described by the general formula of a-b, where a is any integer between 1 to 597 of SEQ ID NO:109, b is an integer of 15 to 611, where both a and b correspond to the positions of nucleotide residues shown in SEQ ID NO:109, and where b is greater than or equal to a+14.

[0778] Features of Protein Encoded by Gene No: 100

[0779] The translation product of this gene shares sequence homology with a C.elegans gene. Based upon its degree of conservation, an important cellular function can be attributed to this protein. When tested against Jurkat cell lines, supernatants removed from cells containing this gene activated the GAS (gamma activating sequence) promoter element. Thus, it is likely that this gene activates T-cells through the JAK-STAT signal transduction pathway. GAS is a promoter element found upstream of many genes which are involved in the Jak-STAT pathway. The Jak-STAT pathway is a large, signal transduction pathway involved in the differentiation and proliferation of cells. Therefore, activation of the Jak-STAT pathway, reflected by the binding of the GAS element, can be used to indicate proteins involved in the proliferation and differentiation of cells.

[0780] In specific embodiments, polypeptides of the invention comprise, or alternatively consists of, an amino acid sequence selected from the group: DPRVRLNSLTCKHIFISLTQ (SEQ ID NO:902), TMKLLKLRRNIVKLSLYRHFTN (SEQ ID NO:895), TLILAVAASIVFIIWTTMKFRI (SEQ ID NO:896), VTCQSDWRELWVDDAIWRLLFSMILFVI (SEQ ID NO:897), MVLWRPSANNQRFAFSPLSEEEEEDEQ (SEQ ID NO:898), MVLWRPSANNQRFAFSPLSEEEEEDEQ (SEQ ID NO:899), KEPMLKESFEGMKMRSTKQEPNGNSKVNKAQEDDL (SEQ ID NO:900), NAFGRHSTAVK (SEQ ID NO:903), ESCLLCGISEYPIQRXICPGCFDPCRXAFSSETLTGSNPGHHSQSGIWHRQATP GVTLHKVVVAXALYLLFSGMEGVLRVTGAQTDLASLAFIPLAFLDTALCWW IFISLTQTMKLLKLRRNIVKLSLYRHFTNTLILAVAASIVFIIWTTMKFRIVTCQ SDWRELWVDDAIWRLLFSMILFVIMVLWRPSANNQRFAFSPLSEEEEEDEQK EPMLKESFEGMKMRSTKQEPNGNSKVNKAQEDDLKWVEENVPSSVTDVALP ALLDSDEERMITHFERSKME (SEQ ID NO:904), and/or KWVEENVPSSVTDVALPALLDSDEERMITHFERSKME (SEQ ID NO:901). Moreover, fragments and variants of these polypeptides (such as, for example, fragments as described herein, polypeptides at least 80%, 85%, 90%, 95%, 96%, 97%, 98%, or 99% identical to these polypeptides and polypeptides encoded by the polynucleotide which hybridizes, under stringent conditions, to the polynucleotide encoding these polypeptides) are encompassed by the invention. Antibodies that bind polypeptides of the invention are also encompassed by the invention. Polynucleotides encoding these polypeptides are also encompassed by the invention.

[0781] The gene encoding the disclosed cDNA is believed to reside on chromosome 15. Accordingly, polynucleotides related to this invention are useful as a marker in linkage analysis for chromosome 15.

[0782] This gene is expressed primarily in thyroid, and to a lesser extent, in osteoclastoma, kidney medulla, and lung.

[0783] Polynucleotides and polypeptides of the invention are useful as reagents for differential identification of the tissue(s) or cell type(s) present in a biological sample and for diagnosis of diseases and conditions which include, but are not limited to, endocrine disorders, particularly thyroid dysfunction or cancer. Similarly, polypeptides and antibodies directed to these polypeptides are useful in providing immunological probes for differential identification of the tissue(s) or cell type(s). For a number of disorders of the above tissues or cells, particularly of the endocrine system, expression of this gene at significantly higher or lower levels may be routinely detected in certain tissues or cell types (e.g., endocrine, skeletal, urogenital, renal, pulmonary, and cancerous and wounded tissues) or bodily fluids (e.g., lymph, pulmonary surfactant or sputum, serum, plasma, urine, syriovial fluid and spinal fluid) or another tissue or cell sample taken from an individual having such a disorder, relative to the standard gene expression level, i.e., the expression level in healthy tissue or bodily fluid from an individual not having the disorder.

[0784] Predicted epitopes include those comprising a sequence shown in SEQ ID NO:348 as residues: Lys-107 to Leu-124, Glu-150 to Thr-159, Pro-173 to Asp-179, Ser-192 to Ser-201.

[0785] The tissue distribution in thyroid, combined with the detected GAS biological activity, indicates that the protein product of this gene is useful for the diagnosis and treatment of thyroid dysfunction or cancer. Protein, as well as, antibodies directed against the protein may show utility as a tumor marker and/or immunotherapy targets for the above listed tissues.

[0786] Many polynucleotide sequences, such as EST sequences, are publicly available and accessible through sequence databases. Some of these sequences are related to SEQ ID NO:110 and may have been publicly available prior to conception of the present invention. Preferably, such related polynucleotides are specifically excluded from the scope of the present invention. To list every related sequence is cumbersome. Accordingly, preferably excluded from the present invention are one or more polynucleotides comprising a nucleotide sequence described by the general formula of a-b, where a is any integer between 1 to 2618 of SEQ ID NO:110, b is an integer of 15 to 2632, where both a and b correspond to the positions of nucleotide residues shown in SEQ ID NO:110, and where b is greater than or equal to a+14.

[0787] Features of Protein Encoded by Gene No: 101

[0788] The gene encoding the disclosed cDNA is thought to reside on chromosome 16. Accordingly, polynucleotides related to this invention are useful as a marker in linkage analysis for chromosome 16.

[0789] In specific embodiments, polypeptides of the invention comprise, or alternatively consists of, an amino acid sequence selected from the group: YEPMDFXMALIYD (SEQ ID NO:905), IRHELTVLRDT RPACA (SEQ ID NO:906), and/or MDFXMALIYD (SEQ ID NO:907). Moreover, fragments and variants of these polypeptides (such as, for example, fragments as described herein, polypeptides at least 80%, 85%, 90%, 95%, 96%, 97%, 98%, or 99% identical to these polypeptides and polypeptides encoded by the polynucleotide which hybridizes, under stringent conditions, to the polynucleotide encoding these polypeptides) are encompassed by the invention. Antibodies that bind polypeptides of the invention are also encompassed by the invention. Polynucleotides encoding these polypeptides are also encompassed by the invention.

[0790] This gene is expressed primarily in kidney cortex, and to a lesser extent, in adult brain, corpus colosum, hippocampus, and frontal cortex.

[0791] Polynucleotides and polypeptides of the invention are useful as reagents for differential identification of the tissue(s) or cell type(s) present in a biological sample and for diagnosis of diseases and conditions which include, but are not limited to, neurological disorders, kidney disorders. Similarly, polypeptides and antibodies directed to these polypeptides are useful in providing immunological probes for differential identification of the tissue(s) or cell type(s). For a number of disorders of the above tissues or cells, particularly of the central nervous system and renal system, expression of this gene at significantly higher or lower levels may be routinely detected in certain tissues or cell types (e.g. kidney, brain, cancerous and wounded tissues) or bodily fluids (e.g., lymph, serum, plasma, urine, synovial fluid and spinal fluid) or another tissue or cell sample taken from an individual having such a disorder, relative to the standard gene expression level, i.e., the expression level in healthy tissue or bodily fluid from an individual not having the disorder.

[0792] The tissue distribution in adult brain, corpus colosum, hippocampus, and frontal cortex indicates that the protein product of this gene is useful for treatment or diagnosis of neurological disorders, such as Alzheimer's Disease, Parkinson's Disease, Huntington's Disease, Tourette's Syndrome, schizophrenia, mania, dementia, paranoia, obsessive compulsive disorder, panic disorder, learning disabilities, ALS, psychoses, autism, and altered behaviors, including disorders in feeding, sleep patterns, balance, and perception. In addition, the gene or gene product may also play a role in the treatment and/or detection of developmental disorders associated with the developing embryo, or sexually-linked disorders. Furthermore, The tissue distribution in kidney indicates that this gene or gene product could be used in the treatment and/or detection of kidney diseases including renal failure, nephritus, renal tubular acidosis, proteinuria, pyuria, edema, pyelonephritis, hydronephritis, nephrotic syndrome, crush syndrome, glomerulonephritis, hematuria, renal colic and kidney stones, in addition to Wilms Tumor Disease, and congenital kidney abnormalities such as horseshoe kidney, polycystic kidney, and Falconi's syndrome. Protein, as well as, antibodies directed against the protein may show utility as a tumor marker and/or immunotherapy targets for the above listed tissues.

[0793] Many polynucleotide sequences, such as EST sequences, are publicly available and accessible through sequence databases. Some of these sequences are related to SEQ ID NO:111 and may have been publicly available prior to conception of the present invention. Preferably, such related polynucleotides are specifically excluded from the scope of the present invention. To list every related sequence is cumbersome. Accordingly, preferably excluded from the present invention are one or more polynucleotides comprising a nucleotide sequence described by the general formula of a-b, where a is any integer between 1 to 2235 of SEQ ID NO:111, b is an integer of 15 to 2249, where both a and b correspond to the positions of nucleotide residues shown in SEQ ID NO:111, and where b is greater than or equal to a+14.

[0794] Features of Protein Encoded by Gene No: 102

[0795] The translation product of this gene shares sequence homology with F15C11.2 of C. elegans which is of unknown function.

[0796] In specific embodiments, polypeptides of the invention comprise, or alternatively consists of, an amino acid sequence selected from the group: MQEMMRNQDRALSNLESIPGGYNA (SEQ ID NO:908), LRRMYTDIQEPMLSAAQEQFGGNPF (SEQ ID NO:909), ASLVSNTSSGEGSQPSRTENRDPLPNPWAPQT (SEQ ID NO:910), SQSSSASSGTASTVGGTTGSTASGTSGQSTTAPNLVPGVGASMFNTPGMQSLL QQITENPQLMQNMLSAPY (SEQ ID NO:911), MRSMMQSLSQNPDLAAQMMLNNPLFAGNPQLQEQMRQQLPTFLQQ (SEQ ID NO:912), MQNPDTLSAMSNPRAMQALLQIQQGLQTLATEAPGLIPGFTPGLGALGSTGG SSGTNGSNATPSENTSPTAGT (SEQ ID NO:913), TEPGHQQFIQQMLQALAGVNPQLQNPEVRFQQQLEQLSAMGFLNREANLQA LIATGGDINAAIERLLGSQPS (SEQ ID NO:914), RNPAMMQEMMRNQDRALSNLESIPGGYNALRRMYTDIQEPMLSAA (SEQ ID NO:915), GNPFASLVSNTSS (SEQ ID NO:916), ENRDPLPNPWA (SEQ ID NO:917), GKILKDQDTLSQHGIHD (SEQ ID NO:918), (GLTVHLVIKTQNRP (SEQ ID NO:919), SELQSQMQRQLLSNPEMM (SEQ ID NO:920), PEISHMLNNPDIMR (SEQ ID NO:921), and/or RQLIMANPQMQQLIQRNP (SEQ ID NO:922). Moreover, fragments and variants of these polypeptides (such as, for example, fragments as described herein, polypeptides at least 80%, 85%, 90%, 95%, 96%, 97%, 98%, or 99% identical to these polypeptides and polypeptides encoded by the polynucleotide which hybridizes, under stringent conditions, to the polynucleotide encoding these polypeptides) are encompassed by the invention. Antibodies that bind polypeptides of the invention are also encompassed by the invention. Polynucleotides encoding these polypeptides are also encompassed by the invention.

[0797] This gene is expressed primarily in breast.

[0798] Polynucleotides and polypeptides of the invention are useful as reagents for differential identification of the tissue(s) or cell type(s) present in a biological sample and for diagnosis of diseases and conditions which include, but are not limited to, breast cancer. Similarly, polypeptides and antibodies directed to these polypeptides are useful in providing immunological probes for differential identification of the tissue(s) or cell type(s). For a number of disorders of the above tissues or cells, particularly of tumor systems, expression of this gene at significantly higher or lower levels may be routinely detected in certain tissues or cell types (e.g. breast, cancerous and wounded tissues) or bodily fluids (e.g., lymph, serum, plasma, urine, synovial fluid and spinal fluid) or another tissue or cell sample taken from an individual having such a disorder, relative to the standard gene expression level, i.e., the expression level in healthy tissue or bodily fluid from an individual not having the disorder.

[0799] The tissue distribution in breast indicates that the protein product of this gene is useful for treatment and diagnosis of some types of breast cancer. Protein, as well as, antibodies directed against the protein may show utility as a tissue-specific marker and/or immunotherapy target for the above listed tissues.

[0800] Many polynucleotide sequences, such as EST sequences, are publicly available and accessible through sequence databases. Some of these sequences are related to SEQ ID NO:112 and may have been publicly available prior to conception of the present invention. Preferably, such related polynucleotides are specifically excluded from the scope of the present invention. To list every related sequence is cumbersome. Accordingly, preferably excluded from the present invention are one or more polynucleotides comprising a nucleotide sequence described by the general formula of a-b, where a is any integer between 1 to 2184 of SEQ ID NO:112, b is an integer of 15 to 2198, where both a and b correspond to the positions of nucleotide residues shown in SEQ ID NO:112, and where b is greater than or equal to a+14.

[0801] Features of Protein Encoded by Gene No: 103

[0802] The translation product of this gene shares sequence homology with secreted serine proteases and lysozyme C precursor, which is thought to be important in bacteriolytic function. In specific embodiments, polypeptides of the invention comprise, or alternatively consists of, an amino acid sequence selected from the group: NLCHVDCQDLLNPNLLAGIHCAKRIVS (SEQ ID NO:923), LDGFEGYSLSDWLCLAFVESKFN (SEQ ID NO:924), NENADGSFDYGLFQINSHYWCN (SEQ ID NO:925), NLCHVDCQDLLNPNLLAGIHCAKRIVS (SEQ ID NO:926), and/or EPSALSCTSSPPR (SEQ ID NO:927). Moreover, fragments and variants of these polypeptides (such as, for example, fragments as described herein, polypeptides at least 80%, 85%, 90%, 95%, 96%, 97%, 98%, or 99% identical to these polypeptides and polypeptides encoded by the polynucleotide which hybridizes, under stringent conditions, to the polynucleotide encoding these polypeptides) are encompassed by the invention. Antibodies that bind polypeptides of the invention are also encompassed by the invention. Polynucleotides encoding these polypeptides are also encompassed by the invention.

[0803] This gene is expressed primarily in testes.

[0804] Polynucleotides and polypeptides of the invention are useful as reagents for differential identification of the tissue(s) or cell type(s) present in a biological sample and for diagnosis of diseases and conditions which include, but are not limited to, infection, immune system disorders, reproductive disorders. Similarly, polypeptides and antibodies directed to these polypeptides are useful in providing immunological probes for differential identification of the tissue(s) or cell type(s). For a number of disorders of the above tissues or cells, particularly of the immune system and reproductive system, expression of this gene at significantly higher or lower levels may be routinely detected in certain tissues or cell types (e.g. testes, cancerous and wounded tissues) or bodily fluids (e.g., lymph, serum, seminal fluid, plasma, urine, synovial fluid and spinal fluid) or another tissue or cell sample taken from an individual having such a disorder, relative to the standard gene expression level, i.e., the expression level in healthy tissue or bodily fluid from an individual not having the disorder.

[0805] Predicted epitopes include those comprising a sequence shown in SEQ ID NO:351 as residues: Ile-62 to Phe-70, Asn-78 to Asn-84.

[0806] The tissue distribution in testes, combined with the homology to lysozyme C precursor indicates that the protein product of this gene is useful for boosting the monocyte-macrophage system, and for enhancing the activity of immune agents. Alternatively, the tissue distribution indicates that the protein product of this gene is useful for the treatment and diagnosis of conditions concerning proper testicular function (e.g. endocrine function, sperm maturation), as well as cancer. Therefore, this gene product is useful in the treatment of male infertility and/or impotence. This gene product is also useful in assays designed to identify binding agents, as such agents (antagonists) are useful as male contraceptive agents. Similarly, the protein is believed to be useful in the treatment and/or diagnosis of testicular cancer. The testes are also a site of active gene expression of transcripts that may be expressed, particularly at low levels, in other tissues of the body. Therefore, this gene product may be expressed in other specific tissues or organs where it may play related functional roles in other processes, such as hematopoiesis, inflammation, bone formation, and kidney function, to name a few possible target indications.

[0807] Many polynucleotide sequences, such as EST sequences, are publicly available and accessible through sequence databases. Some of these sequences are related to SEQ ID NO:113 and may have been publicly available prior to conception of the present invention. Preferably, such related polynucleotides are specifically excluded from the scope of the present invention. To list every related sequence is cumbersome. Accordingly, preferably excluded from the present invention are one or more polynucleotides comprising a nucleotide sequence described by the general formula of a-b, where a is any integer between 1 to 1029 of SEQ ID NO:113, b is an integer of 15 to 1043, where both a and b correspond to the positions of nucleotide residues shown in SEQ ID NO:113, and where b is greater than or equal to a+14.

[0808] Features of Protein Encoded by Gene No: 104

[0809] This gene is expressed primarily in apoptotic T-cell, and to a lesser extent in CD34(+) cells.

[0810] Polynucleotides and polypeptides of the invention are useful as reagents for differential identification of the tissue(s) or cell type(s) present in a biological sample and for diagnosis of diseases and conditions which include, but are not limited to, immune disorders. Similarly, polypeptides and antibodies directed to these polypeptides are useful in providing immunological probes for differential identification of the tissue(s) or cell type(s). For a number of disorders of the above tissues or cells, particularly of the immune system, expression of this gene at significantly higher or lower levels may be routinely detected in certain tissues or cell types (e.g. immune, cancerous and wounded tissues) or bodily fluids (e.g., lymph, serum, plasma, urine, synovial fluid and spinal fluid) or another tissue or cell sample taken from an individual having such a disorder, relative to the standard gene expression level, i.e., the expression level in healthy tissue or bodily fluid from an individual not having the disorder.

[0811] The tissue distribution in T-cells indicates that the protein product of this gene is useful for treatment and diagnosis of some immune disorders. Furthermore, this gene product may be involved in the regulation of cytokine production, antigen presentation, or other processes that may also suggest a usefulness in the treatment of cancer (e.g. by boosting immune responses). Since the gene is expressed in cells of lymphoid origin, the gene or protein, as well as, antibodies directed against the protein may show utility as a tumor marker and/or immunotherapy targets for the above listed tissues. Therefore it may be also used as an agent for immunological disorders including arthritis, asthma, immune deficiency diseases such as AIDS, leukemia, rheumatoid arthritis, inflammatory bowel disease, sepsis, acne, and psoriasis. In addition, this gene product may have commercial utility in the expansion of stem cells and committed progenitors of various blood lineages, and in the differentiation and/or proliferation of various cell types. Expression of this gene product in T cells also strongly indicates a role for this protein in immune function and immune surveillance. Protein, as well as, antibodies directed against the protein may show utility as a tumor marker and/or immunotherapy targets for the above listed tissues.

[0812] Many polynucleotide sequences, such as EST sequences, are publicly available and accessible through sequence databases. Some of these sequences are related to SEQ ID NO:114 and may have been publicly available prior to conception of the present invention. Preferably, such related polynucleotides are specifically excluded from the scope of the present invention. To list every related sequence is cumbersome. Accordingly, preferably excluded from the present invention are one or more polynucleotides comprising a nucleotide sequence described by the general formula of a-b, where a is any integer between 1 to 689 of SEQ ID NO:114, b is an integer of 15 to 703, where both a and b correspond to the positions of nucleotide residues shown in SEQ ID NO:114, and where b is greater than or equal to a+14.

[0813] Features of Protein Encoded by Gene No: 105

[0814] The translation product of this gene shares sequence homology with ARI protein of Drosophila (See Genbank Accession 2058299; EMBL: locus DMARIADNE, accession X98309), which is thought to be important in axonal path-finding in the central nervous system.

[0815] In specific embodiments, polypeptides of the invention comprise, or alternatively consists of, an amino acid sequence selected from the group: IREVNEVIQNPAT (SEQ ID NO:928), ITRILLSHFNWDKEKLMERYFDGNLEKLFA (SEQ ID NO:929), NTRSSAQDMPCQICYLNYPNSYF (SEQ ID NO:930), TGL ECGHKFCMQCWSEYLTTKIMEEGMGQTISCPAHG (SEQ ID NO:936), CDILVDDNTVMRLITDSKVKLKYQHLITNSFVECNRLLKWCPAPDCHHVVKV QYPDAKPV (SEQ ID NO:931), CDILVDDNTVMRLITDSKVKLKYQHLITNSFVECNRLLKWCPAPDCHHVVKV (SEQ ID NO:932), GCNHMVCRNQNCKAEFCWVCLGPWEPHGSAWYNCNRYNEDDAKAARDA QERSRAALQRYL (SEQ ID NO:933), FYCNRYMNHMQSLRFEHKLYAQVKQKMEEMQQIINMSWIEVQFLKKAVDV LCQCRATLMYT (SEQ ID NO:934), and/or YVFAFYLKKNNQSIIFENNQADLENATEVLSGYLERDISQDSLQDIKQKVQDK YRYCESR (SEQ ID NO:935). Moreover, fragments and variants of these polypeptides (such as, for example, fragments as described herein, polypeptides at least 80%, 85%, 90%, 95%, 96%, 97%, 98%, or 99% identical to these polypeptides and polypeptides encoded by the polynucleotide which hybridizes, under stringent conditions, to the polynucleotide encoding these polypeptides) are encompassed by the invention. Antibodies that bind polypeptides of the invention are also encompassed by the invention. Polynucleotides encoding these polypeptides are also encompassed by the invention.

[0816] This gene is expressed primarily in adult brain, and to a lesser extent in testes, endometrial tumor, melanocytes, and infant brain.

[0817] Polynucleotides and polypeptides of the invention are useful as reagents for differential identification of the tissue(s) or cell type(s) present in a biological sample and for diagnosis of diseases and conditions which include, but are not limited to, diseases or injuries involving axonal path development. Similarly, polypeptides and antibodies directed to these polypeptides are useful in providing immunological probes for differential identification of the tissue(s) or cell type(s). For a number of disorders of the above tissues or cells, particularly of the central nervous system, expression of this gene at significantly higher or lower levels may be routinely detected in certain tissues or cell types (e.g. brain, testes, cancerous and wounded tissues) or bodily fluids (e.g., lymph, serum, plasma, urine, synovial fluid and spinal fluid) or another tissue or cell sample taken from an individual having such a disorder, relative to the standard gene expression level, i.e., the expression level in healthy tissue or bodily fluid from an individual not having the disorder.

[0818] The tissue distribution in adult brain, combined with the homology to ARI protein indicates that the protein product of this gene is useful for the treatment of disease states or injuries involving axonal path development, including neurodegenerative diseases and nerve injury, such as Alzheimer's Disease, Parkinson's Disease, Huntington's Disease, Tourette's Syndrome, schizophrenia, mania, dementia, paranoia, obsessive compulsive disorder, panic disorder, learning disabilities, ALS, psychoses, autism, and altered behaviors, including disorders in feeding, sleep patterns, balance, and perception. In addition, the gene or gene product may also play a role in the treatment and/or detection of developmental disorders associated with the developing embryo, or sexually-linked disorders. Protein, as well as, antibodies directed against the protein may show utility as a tumor marker and/or immunotherapy targets for the above listed tissues.

[0819] Many polynucleotide sequences, such as EST sequences, are publicly available and accessible through sequence databases. Some of these sequences are related to SEQ ID NO:115 and may have been publicly available prior to conception of the present invention. Preferably, such related polynucleotides are specifically excluded from the scope of the present invention. To list every related sequence is cumbersome. Accordingly, preferably excluded from the present invention are one or more polynucleotides comprising a nucleotide sequence described by the general formula of a-b, where a is any integer between 1 to 3670 of SEQ ID NO:115, b is an integer of 15 to 3684, where both a and b correspond to the positions of nucleotide residues shown in SEQ ID NO:115, and where b is greater than or equal to a+14.

[0820] Features of Protein Encoded By Gene No: 106

[0821] The translation product of this gene shares sequence homology with cytochrome b561 [Sus scrofa] which is thought to be an integral membrane protein of neuroendocrine storage vesicles of neurotransmitters and peptide hormones. The gene encoding the disclosed cDNA is thought to reside on chromosome 11.

[0822] Accordingly, polynucleotides related to this invention are useful as a marker in linkage analysis for chromosome 11.

[0823] This gene is expressed primarily in frontal cortex, and to a lesser extent in rhabdomyosarcoma. Polynucleotides and polypeptides of the invention are useful as reagents for differential identification of the tissue(s) or cell type(s) present in a biological sample and for diagnosis of diseases and conditions which include, but are not limited to, neurological disorders. Similarly, polypeptides and antibodies directed to these polypeptides are useful in providing immunological probes for differential identification of the tissue(s) or cell type(s). For a number of disorders of the above tissues or cells, particularly of the central nervous system, expression of this gene at significantly higher or lower levels may be routinely detected in certain tissues or cell types (e.g. brain, cancerous and wounded tissues) or bodily fluids (e.g., lymph, serum, plasma, urine, synovial fluid and spinal fluid) or another tissue or cell sample taken from an individual having such a disorder, relative to the standard gene expression level, i.e., the expression level in healthy tissue or bodily fluid from an individual not having the disorder.

[0824] Predicted epitopes include those comprising a sequence shown in SEQ ID NO:354 as residues: Ser-18 to Pro-24.

[0825] The tissue distribution in frontal cortex, combined with the homology to cytochrome b561 [Sus scrofa] indicates that the protein product of this gene is useful for the treatment and diagnosis of neurological disorders. This gene may also be important in the regulation of some types of cancers. Furthermore, the tissue distribution indicates that the protein product of this gene is useful for the diagnosis and/or treatment of disorders of the brain and nervous system. Elevated expression of this gene product within the frontal cortex of the brain indicates that it may be involved in neuronal survival; synapse formation; conductance; neural differentiation, etc. Such involvement may impact many processes, such as learning and cognition. It may also be useful in the treatment of such neurodegenerative disorders as schizophrenia; ALS; or Alzheimer's.

[0826] Many polynucleotide sequences, such as EST sequences, are publicly available and accessible through sequence databases. Some of these sequences are related to SEQ ID NO:116 and may have been publicly available prior to conception of the present invention. Preferably, such related polynucleotides are specifically excluded from the scope of the present invention. To list every related sequence is cumbersome. Accordingly, preferably excluded from the present invention are one or more polynucleotides comprising a nucleotide sequence described by the general formula of a-b, where a is any integer between 1 to 1951 of SEQ ID NO:116, b is an integer of 15 to 1965, where both a and b correspond to the positions of nucleotide residues shown in SEQ ID NO:116, and where b is greater than or equal to a+14.

[0827] Features of Protein Encoded by Gene No: 107

[0828] In specific embodiments, polypeptides of the invention comprise, or alternatively consists of, an amino acid sequence selected from the group: MWGYLFVDAAWNFLGCLICGW (SEQ ID NO:937), MHFISSGNVSAIRSSILLLRXSLSYLGNCLRVSAIFVYFLLFLLLS (SEQ ID NO:938), and/or MDQALRGSPSEGFSTDPSPPQVGRQIPSFPPWRRLVLPKASGCFLEREWWLCV FKLRTRPGAEAHAYNSSILGGRGKGIT (SEQ ID NO:939). Moreover, fragments and variants of these polypeptides (such as, for example, fragments as described herein, polypeptides at least 80%, 85%, 90%, 95%, 96%, 97%, 98%, or 99% identical to these polypeptides and polypeptides encoded by the polynucleotide which hybridizes, under stringent conditions, to the polynucleotide encoding these polypeptides) are encompassed by the invention. Antibodies that bind polypeptides of the invention are also encompassed by the invention. Polynucleotides encoding these polypeptides are also encompassed by the invention.

[0829] This gene is expressed primarily in pancreas tumor, and to a lesser extent in cerebellum.

[0830] Polynucleotides and polypeptides of the invention are useful as reagents for differential identification of the tissue(s) or cell type(s) present in a biological sample and for diagnosis of diseases and conditions which include, but are not limited to, pancreatic tumors. Similarly, polypeptides and antibodies directed to these polypeptides are useful in providing immunological probes for differential identification of the tissue(s) or cell type(s). For a number of disorders of the above tissues or cells, particularly of the endocrine system, expression of this gene at significantly higher or lower levels may be routinely detected in certain tissues or cell types (e.g. pancreas, cancerous and wounded tissues) or bodily fluids (e.g., lymph, serum, plasma, urine, synovial fluid and spinal fluid) or another tissue or cell sample taken from an individual having such a disorder, relative to the standard gene expression level, i.e., the expression level in healthy tissue or bodily fluid from an individual not having the disorder.

[0831] Predicted epitopes include those comprising a sequence shown in SEQ ID NO:355 as residues: Pro-22 to Phe-33.

[0832] The tissue distribution in pancreas tumors indicates that the protein product of this gene is useful for diagnosis and treatment of pancreatic tumors, and/or tumors of metabolic tissues and cell types. Protein, as well as, antibodies directed against the protein may show utility as a tumor marker and/or immunotherapy targets for the above listed tissues.

[0833] Many polynucleotide sequences, such as EST sequences, are publicly available and accessible through sequence databases. Some of these sequences are related to SEQ ID NO:117 and may have been publicly available prior to conception of the present invention. Preferably, such related polynucleotides are specifically excluded from the scope of the present invention. To list every related sequence is cumbersome. Accordingly, preferably excluded from the present invention are one or more polynucleotides comprising a nucleotide sequence described by the general formula of a-b, where a is any integer between 1 to 489 of SEQ ID NO:117, b is an integer of 15 to 503, where both a and b correspond to the positions of nucleotide residues shown in SEQ ID NO:117, and where b is greater than or equal to a+14.

[0834] Features of Protein Encoded by Gene No: 108

[0835] The gene encoding the disclosed cDNA is thought to reside on chromosome 17. Accordingly, polynucleotides related to this invention are useful as a marker in linkage analysis for chromosome 17.

[0836] In specific embodiments, polypeptides of the invention comprise, or alternatively consists of, an amino acid sequence selected from the group: MLPALASCCHFSPPEQAARLKKLQEQEKQQKVEFRKRMEKEVSDFIQDSGQI KKKFQPMNKIERSILHDVVEVAGLTSFSFGEDDDCRYVMIFKKEFAPSDEELD SYRRGEEWDPQKAEEKRNXKELAQRQ (SEQ ID NO:940), EEEAAQQGPVVVSPASDYKDKYSHLIGKGAAKDAAHMLQANKTYGCXPVA NKRDTRSIEEAMNEIRAKKRLRQSGE (SEQ ID NO:941), PPRRPAQLPLTPGAGQGAGRDKAAAIRAHPGAPPLNHLLP (SEQ ID NO:942), AVPQAGGKQVFDLSPLELGYVRGMCVCV (SEQ ID NO:943) and/or MLPALASCCHFSPPEQAARLKKLQEQEKQQKVEFRKRMEKEVSDFIQDSGQI KKKFQPMNKIERSILHDVVEVAGLTSFSFGEDDDCRYVMIFKKEFAPSDEELD SYRRGEEWDPQKAEEKRNXKELAQRQEEEAAQQGPVVVSPASDYKDKYSHL IGKGAAKDAAHMLQANKTYGCXPVANKRDTRSIE AMNE A RQSGE (SEQ ID NO:944). Moreover, fragments and variants of these polypeptides (such as, for example, fragments as described herein, polypeptides at least 80%, 85%, 90%, 95%, 96%, 97%, 98%, or 99% identical to these polypeptides and polypeptides encoded by the polynucleotide which hybridizes, under stringent conditions, to the polynucleotide encoding these polypeptides) are encompassed by the invention. Antibodies that bind polypeptides of the invention are also encompassed by the invention. Polynucleotides encoding these polypeptides are also encompassed by the invention.

[0837] The translation product of this gene shares sequence homology with FSA-1, which may play a role as a structural protein component of the acrosome. The mammalian spermatozoon undergoes continuous modifications during spermatogenesis, maturation in the epididymis, and capacitation in the female reproductive tract. Only the capacitated spermatozoa are capable of binding the zona-intact egg and undergoing the acrosome reaction. The fertilization process is a net result of multiple molecular events which enable ejaculated spermatozoa to recognize and bind to the egg's extracellular coat, the zona pellucida (ZP). Sperm-egg interaction is a species-specific event which is initiated by the recognition and binding of complementary molecule(s) present on sperm plasma membrane (receptor) and the surface of the ZP (ligand). This is a carbohydrate-mediated event which initiates a signal transduction cascade resulting in the exocytosis of acrosomal contents. This step is believed to be a prerequisite which enables the acrosome reacted spermatozoa to penetrate the ZP and fertilize the egg. Recently, another group published this gene, calling it sperm acrosomal protein [Homo sapiens] (Proc. Natl. Acad. Sci. U.S.A. 95 (14), 8175-8180 (1998)).

[0838] This gene is expressed primarily in fetal kidney and sperm.

[0839] Polynucleotides and polypeptides of the invention are useful as reagents for differential identification of the tissue(s) or cell type(s) present in a biological sample and for diagnosis of diseases and conditions which include, but are not limited to, male reproductive disorders, especially involving acrosomal dysfunction. Similarly, polypeptides and antibodies directed to these polypeptides are useful in providing immunological probes for differential identification of the tissue(s) or cell type(s). For a number of disorders of the above tissues or cells, particularly of the male reproductive system, expression of this gene at significantly higher or lower levels may be routinely detected in certain tissues or cell types (e.g. sperm, cancerous and wounded tissues) or bodily fluids (e.g., lymph, serum, plasma, urine, synovial fluid and spinal fluid) or another tissue or cell sample taken from an individual having such a disorder, relative to the standard gene expression level, i.e., the expression level in healthy tissue or bodily fluid from an individual not having the disorder.

[0840] Predicted epitopes include those comprising a sequence shown in SEQ ID NO:356 as residues: Met-12 to Gln-30, Lys-35 to Val-46, Arg-49 to Val-56, Gln-61 to Glu-77, Gly-96 to Cys-01, Glu-110 to Lys-139, Leu-141 to Gln-151, Ser-161 to Tyr-167, Asn-196 to Ile-203, Arg-211 to Ser-227.

[0841] The tissue distribution in sperm, combined with the homology to FSA-1 and the Homo sapiens sperm acrosomal protein indicates that the protein product of this gene is useful for the treatment of infertility due to acrosomal dysfunction of sperm. Protein may also be useful as a contraceptive either alone, or in combination with other therapies. Protein, as well as, antibodies directed against the protein may show utility as a tumor marker and/or immunotherapy targets for the above listed tissues.

[0842] Many polynucleotide sequences, such as EST sequences, are publicly available and accessible through sequence databases. Some of these sequences are related to SEQ ID NO:118 and may have been publicly available prior to conception of the present invention. Preferably, such related polynucleotides are specifically excluded from the scope of the present invention. To list every related sequence is cumbersome. Accordingly, preferably excluded from the present invention are one or more polynucleotides comprising a nucleotide sequence described by the general formula of a-b, where a is any integer between 1 to 1057 of SEQ ID NO:118, b is an integer of 15 to 1071, where both a and b correspond to the positions of nucleotide residues shown in SEQ ID NO:118, and where b is greater than or equal to a+14.

[0843] Features of Protein Encoded by Gene No: 109

[0844] This gene is expressed primarily in pituitary tissue, and to a lesser extent in epididymus.

[0845] Polynucleotides and polypeptides of the invention are useful as reagents for differential identification of the tissue(s) or cell type(s) present in a biological sample and for diagnosis of diseases and conditions which include, but are not limited to, male reproductive disorders. Similarly, polypeptides and antibodies directed to these polypeptides are useful in providing immunological probes for differential identification of the tissue(s) or cell type(s). For a number of disorders of the above tissues or cells, particularly of the male reproductive system, expression of this gene at significantly higher or lower levels may be routinely detected in certain tissues or cell types (e.g. epididymus, cancerous and wounded tissues) or bodily fluids (e.g., lymph, serum, plasma, urine, synovial fluid and spinal fluid) or another tissue or cell sample taken from an individual having such a disorder, relative to the standard gene expression level, i.e., the expression level in healthy tissue or bodily fluid from an individual not having the disorder.

[0846] Predicted epitopes include those comprising a sequence shown in SEQ ID NO:357 as residues: Met-1 to Trp-6.

[0847] Because the gene is found in both pituitary and epididymus, this indicates that the protein product of this gene is useful for the treatment and diagnosis of male reproductive disorders. This may involve a secreted peptide produced in the pituitary targeting the epididymus. Protein, as well as, antibodies directed against the protein may show utility as a tumor marker and/or immunotherapy targets for the above listed tissues.

[0848] Many polynucleotide sequences, such as EST sequences, are publicly available and accessible through sequence databases. Some of these sequences are related to SEQ ID NO:119 and may have been publicly available prior to conception of the present invention. Preferably, such related polynucleotides are specifically excluded from the scope of the present invention. To list every related sequence is cumbersome. Accordingly, preferably excluded from the present invention are one or more polynucleotides comprising a nucleotide sequence described by the general formula of a-b, where a is any integer between 1 to 1087 of SEQ ID NO:119, b is an integer of 15 to 1101, where both a and b correspond to the positions of nucleotide residues shown in SEQ ID NO:119, and where b is greater than or equal to a+14.

[0849] Features of Protein Encoded by Gene No: 110

[0850] In specific embodiments, polypeptides of the invention comprise, or alternatively consists of, an amino acid sequence selected from the group: LLCPVLNSGXSWNFPHPSQPEYSFHGFHSTRLWI (SEQ ID NO:945), and/or PSTPWFLFLLGLTCPFSTSHPRWDSIPP (SEQ ID NO:946). Moreover, fragments and variants of these polypeptides (such as, for example, fragments as described herein, polypeptides at least 80%, 85%, 90%, 95%, 96%, 97%, 98%, or 99% identical to these polypeptides and polypeptides encoded by the polynucleotide which hybridizes, under stringent conditions, to the polynucleotide encoding these polypeptides) are encompassed by the invention. Antibodies that bind polypeptides of the invention are also encompassed by the invention. Polynucleotides encoding these polypeptides are also encompassed by the invention.

[0851] This gene is expressed primarily in resting T-cells.

[0852] Polynucleotides and polypeptides of the invention are useful as reagents for differential identification of the tissue(s) or cell type(s) present in a biological sample and for diagnosis of diseases and conditions which include, but are not limited to, T-cell disorders. Similarly, polypeptides and antibodies directed to these polypeptides are useful in providing immunological probes for differential identification of the tissue(s) or cell type(s). For a number of disorders of the above tissues or cells, particularly of the immune system, expression of this gene at significantly higher or lower levels may be routinely detected in certain tissues or cell types (e.g. immune, cancerous and wounded tissues) or bodily fluids (e.g., lymph, serum, plasma, urine, synovial fluid and spinal fluid) or another tissue or cell sample taken from an individual having such a disorder, relative to the standard gene expression level, i.e., the expression level in healthy tissue or bodily fluid from an individual not having the disorder.

[0853] The tissue distribution in T-cells indicates that the protein product of this gene is useful for the treatment and diagnosis of certain immune disorders, especially those involving T-cells. Furthermore, this gene product may be involved in the regulation of cytokine production, antigen presentation, or other processes that may also suggest a usefulness in the treatment of cancer (e.g. by boosting immune responses). Since the gene is expressed in cells of lymphoid origin, the gene or protein, as well as, antibodies directed against the protein may show utility as a tumor marker and/or immunotherapy targets for the above listed tissues. Therefore it may be also used as an agent for immunological disorders including arthritis, asthma, immune deficiency diseases such as AIDS, leukemia, rheumatoid arthritis, inflammatory bowel disease, sepsis, acne, and psoriasis. In addition, this gene product may have commercial utility in the expansion of stem cells and committed progenitors of various blood lineages, and in the differentiation and/or proliferation of various cell types. Expression of this gene product in T cells also strongly indicates a role for this protein in immune function and immune surveillance. Protein, as well as, antibodies directed against the protein may show utility as a tumor marker anchor immunotherapy targets for the above listed tissues.

[0854] Many polynucleotide sequences, such as EST sequences, are publicly available and accessible through sequence databases. Some of these sequences are related to SEQ ID NO:120 and may have been publicly available prior to conception of the present invention. Preferably, such related polynucleotides are specifically excluded from the scope of the present invention. To list every related sequence is cumbersome. Accordingly, preferably excluded from the present invention are one or more polynucleotides comprising a nucleotide sequence described by the general formula of a-b, where a is any integer between 1 to 268 of SEQ ID NO:120, b is an integer of 15 to 282, where both a and b correspond to the positions of nucleotide residues shown in SEQ ID NO:120, and where b is greater than or equal to a+14.

[0855] Features of Protein Encoded by Gene No: 111

[0856] The gene encoding the disclosed cDNA is thought to reside on chromosome 10. Accordingly, polynucleotides related to this invention are useful as a marker in linkage analysis for chromosome 10.

[0857] This gene is expressed primarily in cerebellum and whole brain, and to a lesser extent in infant brain and fetal kidney.

[0858] Polynucleotides and polypeptides of the invention are useful as reagents for differential identification of the tissue(s) or cell type(s) present in a biological sample and for diagnosis of diseases and conditions which include, but are not limited to, neurological disorders. Similarly, polypeptides and antibodies directed to these polypeptides are useful in providing immunological probes for differential identification of the tissue(s) or cell type(s). For a number of disorders of the above tissues or cells, particularly of the central nervous system, expression of this gene at significantly higher or lower levels may be routinely detected in certain tissues or cell types (e.g. brain, cancerous and wounded tissues) or bodily fluids (e.g., lymph, serum, plasma, urine, synovial fluid and spinal fluid) or another tissue or cell sample taken from an individual having such a disorder, relative to the standard gene expression level, i.e., the expression level in healthy tissue or bodily fluid from an individual not having the disorder.

[0859] Predicted epitopes include those comprising a sequence shown in SEQ ID NO:359 as residues: Asp-48 to Gly-55.

[0860] The tissue distribution in cerebellum and whole brain indicates that the protein product of this gene is useful for diagnosis and treatment of neurological disorders, such as Alzheimer's Disease, Parkinson's Disease, Huntington's Disease, Tourette's Syndrome, schizophrenia, mania, dementia, paranoia, obsessive compulsive disorder, panic disorder, learning disabilities, ALS, psychoses, autism, and altered behaviors, including disorders in feeding, sleep patterns, balance, and perception. In addition, the gene or gene product may also play a role in the treatment and/or detection of developmental disorders associated with the developing embryo, or sexually-linked disorders. Protein, as well as, antibodies directed against the protein may show utility as a tumor marker and/or immunotherapy targets for the above listed tissues.

[0861] Many polynucleotide sequences, such as EST sequences, are publicly available and accessible through sequence databases. Some of these sequences are related to SEQ ID NO:121 and may have been publicly available prior to conception of the present invention. Preferably, such related polynucleotides are specifically excluded from the scope of the present invention. To list every related sequence is cumbersome. Accordingly, preferably excluded from the present invention are one or more polynucleotides comprising a nucleotide sequence described by the general formula of a-b, where a is any integer between 1 to 2621 of SEQ ID NO:121, b is an integer of 15 to 2635, where both a and b correspond to the positions of nucleotide residues shown in SEQ ID NO:121, and where b is greater than or equal to a+14.

[0862] Features of Protein Encoded by Gene No: 112

[0863] The translation product of this gene shares sequence homology with yeast mitochondrial ribosomal protein, which is homologous to ribosomal protein s15 of E. coli, which is thought to be important in the early assembly of ribosomes (See Genbank Accession No. M38016). The gene encoding the disclosed cDNA is thought to reside on chromosome 1. Accordingly, polynucleotides related to this invention are useful as a marker in linkage analysis for chromosome 1.

[0864] This gene is expressed primarily in developmental tissues.

[0865] Polynucleotides and polypeptides of the invention are useful as reagents for differential identification of the tissue(s) or cell type(s) present in a biological sample and for diagnosis of diseases and conditions which include, but are not limited to, development of cancers and tumors in addition to healing wounds. Similarly, polypeptides and antibodies directed to these polypeptides are useful in providing immunological probes for differential identification of the tissue(s) or cell type(s). For a number of disorders of the above tissues or cells, particularly of the immune and developmental systems, expression of this gene at significantly higher or lower levels may be routinely detected in certain tissues or cell types (e.g. developmental, cancerous and wounded tissues) or bodily fluids (e.g., lymph, serum, plasma, urine, synovial fluid and spinal fluid) or another tissue or cell sample taken from an individual having such a disorder, relative to the standard gene expression level, i.e., the expression level in healthy tissue or bodily fluid from an individual not having the disorder.

[0866] The tissue distribution in developmental tissues, combined with the homology to ribosomal protein s15 of E. coli indicates that the protein product of this gene is useful for the diagnosis and/or treatment of diseases related to the assembly of ribosomes in the mitochondria, which is important in the translation of RNA into protein. Therefore, this indicates that the protein product of this gene is also useful for the diagnosis and intervention of multiple tumors, as well as in healing wounds, which are thought to be under similar regulation as developmental tissues. Protein, as well as, antibodies directed against the protein have utility as tumor markers, in addition to immunotherapy targets, for the above listed tumors and tissues.

[0867] Many polynucleotide sequences, such as EST sequences, are publicly available and accessible through sequence databases. Some of these sequences are related to SEQ ID NO:122 and may have been publicly available prior to conception of the present invention. Preferably, such related polynucleotides are specifically excluded from the scope of the present invention. To list every related sequence is cumbersome. Accordingly, preferably excluded from the present invention are one or more polynucleotides comprising a nucleotide sequence described by the general formula of a-b, where a is any integer between 1 to 980 of SEQ ID NO:122, b is an integer of 15 to 994, where both a and b correspond to the positions of nucleotide residues shown in SEQ ID NO:122, and where b is greater than or equal to a+14.

[0868] Features of Protein Encoded by Gene No: 113

[0869] For purposes of this application, this gene and its corresponding translation product are known as the B7-H4 gene and B7-H4 protein. This protein is believed to reside as a cell-surface molecule, and the transmembrane domain of this protein is believed to embody the following preferred amino acid residues: GIVAFIVFLLLIMLIFL (SEQ ID NO:1236). Polynucleotides encoding this polypeptide are also encompassed by the invention, as are antibodies that bind the polypeptide. The B7-H4 gene shares sequence homology with members of the B7 family of ligands (i.e., B7-1 (See Genbank Accession 507873)). These proteins and their corresponding receptors play vital roles in the growth, differentiation and death of T cells. For example, some members of this family (i.e., B7-H1) are involved in costimulation of the T cell response, as well as inducing increased cytokine production. Therefore, agonists and/or antagonists such as antibodies or small molecules directed against the B7-H4 gene are useful for treating T cell mediated immune system disorders. The gene encoding the disclosed cDNA is thought to reside on chromosome 1. Accordingly, polynucleotides related to this invention have uses, such as, for example, as a marker in linkage analysis for chromosome 1.

[0870] The translation product of this gene shares sequence homology with human poliovirus receptor precursors which are thought to be important in viral binding and uptake. The translation product of this gene also shares homology with a mouse member of the immunoglobulin superfamily, which is thought to be important in proper immune function (GENBANK: accession AF061260).

[0871] In specific embodiments, polypeptides of the invention comprise, or alternatively consists of, an amino acid sequence selected from the group: ELSISISNVALADEGEYTCSIFTMPVRTAKSLVTVLGIPQKPIITGYKSSLREKD TATLNCQS SGSKPAARLTWRKGDQELHGEPTRIQEDPNGKTFTVSSSVTFQVT REDDGASIVCSVNHESLKGADRSTSQRIEVLYTPTAMIRPDPPHPREGQKLLL HCEGRGNPVPQQYLWEKEGSVPPLKMTQESALIFPFLNKSDSGTYGCTATSN MGSYKAYYTLNVND (SEQ ID NO:947), ELSISISNVALADEGEYTCSIFTMPVRTAKSLVTVLGIPQKPIITGYKSSLREKD TATLNCQSS (SEQ ID NO:948), CQSSGSKPAARLTWRKGDQELHGEPTRIQEDPNGKTFTVSSSVTFQVTREDD GASIVCSVNHESL (SEQ ID NO:949), HESLKGADRSTSQRIEVLYTPTAMIRPDPPHPREGQKLLLHCEGRGNPVPQQY LWEKE (SEQ ID NO:950), WEKEGSVPPLKMTQESALIFPFLNKSDSGTYGCTATSNMGSYKAYYTLNVND (SEQ ID NO:951), PSPVPSSSSTYHAIIGGIVAFIVFLLLIMLIFLGHY (SEQ ID NO:952), and/or LIRHKGTYLTHEAKGSDDAPDADTAIINAEGGQSGGDDKK EYFI (SEQ ID NO:953). Moreover, fragments and variants of these polypeptides (such as, for example, fragments as described herein, polypeptides at least 80%, 85%, 90%, 95%, 96%, 97%, 98%, or 99% identical to these polypeptides and polypeptides encoded by the polynucleotide which hybridizes, under stringent conditions, to the polynucleotide encoding these polypeptides) are encompassed by the invention. Antibodies that bind polypeptides of the invention are also encompassed by the invention. Polynucleotides encoding these polypeptides are also encompassed by the invention.

[0872] A splice variant of this gene has been identified which encodes a polypeptide lacking the following amino acid segment of SEQ ID NO:361: DGYWQEQDLELGTLAPLDEAISSTWSSPDMLASQ (SEQ ID NO:1240). This splice variant was identified in clone HCE1K47, deposited in ATCC Deposit Accession No. PTA-2574 on Oct. 5, 2000 and in ATCC Deposit Accession No. PTA-3070 on Feb. 16, 2001.

[0873] In specific embodiments, polypeptides of the invention comprise, or alternatively consists of, an amino acid sequence selected from the group: NLSQDGYWQEQDLELGTLAPLDEAISSTWSSPDMLASQDSQP (SEQ ID NO: 1241), DGYWQEQDLELGTLAPLDEAISSTWSSPDMLASQ (SEQ ID NO:1240), and/or NLSQDSQP (SEQ ID NO:1242). In a further specific embodiment, polypeptides of the invention comprise, or alternatively consist of, the following amino acid sequence: MGAPAASLLLLLLLFACCWAPGGANLSQDDSQPWTSDETVVAGGTVVLKCQ VKDHEDSSLQWS (SEQ ID NO:1243). Moreover, fragments and variants of these polypeptides (such as, for example, fragments as described herein, polypeptides at least 80%, 85%, 90%, 95%, 96%, 97%, 98%, or 99% identical to these polypeptides and polypeptides encoded by the polynucleotide which hybridizes, under stringent conditions, to the polynucleotide encoding these polypeptides) are encompassed by the invention. Antibodies that bind polypeptides of the invention are also encompassed by the invention. Polynucleotides encoding these polypeptides are also encompassed by the invention.

[0874] It has been discovered that this gene is expressed almost exclusively in human brain tissue.

[0875] Preferred polypeptides of the present invention comprise, or alternatively consist of, one, two, three, four, five, six, seven, eight, nine, ten, eleven, twelve, thirteen, fourteen, fifteen, sixteen, or all sixteen of the immunogenic epitopes of the extracellular portion of the B7-H4 protein shown in SEQ ID NO:361 as residues: Leu-26 to Asp-36, Gln-63 to Asp-71, Lys-87 to Gln-102, Gly-107 to Arg-116, Tyr-172 to Ala-182, Thr-198 to His-207, Glu-209 to Lys-220, Thr-233 to Gly-238, Glu-248 to Gln-259, Pro-273 to Gln-282, Glu-289 to Gln-297, Asn-324 to Thr-330, Val-350 to Pro-355, Ile-390 to Thr-395, Ala-401 to Ala-410, Glu-418 to Tyr-430. Polynucleotides encoding these polypeptides are also encompassed by the invention, as are antibodies that bind one or more of these peptides.

[0876] In additional nonexclusive embodiments, polypeptides of the invention comprise, or alternatively consist of, one or more of the following amino acid sequences:

[0877] 1.) The extracellular domain of the B7-H4 protein:

[0878] MGAPAASLLLLLLLFACCWAPGGANLSQDGYWQEQDLELGTLAPLDEAISST WSSPDMLASQDSQPWTSDETVVAGGTVVLKCQVKDHEDSSLQWSNPAQQT LYFGEKRALRDNRIQLVTSTPHELSISISNVALADEGEYTCSIFTMPVRTAKSL VTVLGIPQKPIITGYKSSLREKDTATLNCQSSGSKPAARLTWRKGDQELHGEP TRIQEDPNGKTFTVSSSVTFQVTREDDGASIVCSVNHESLKGADRSTSQRIEVL YTPTAMIRPDPPHPREGQKLLLHCEGRGNPVPQQYLWEKEGSVPPLKMTQES ALIFPFLNKSDSGTYGCTATSNMGSYKAYYTLNVNDPSPVPSSSSTYHAIIG (SEQ ID NO:1237);

[0879] 2.) The mature extracellular domain of the B7-H4 protein:

[0880] NLSQDGYWQEQDLELGTLAPLDEAISSTVWSSPDMLASQDSQPWTSDETVV AGGTVVLKCQVKDHEDSSLQWSNPAQQTLYFGEKRALRDNRIQLVTSTPHEL SISISNVALADEGEYTCSIFTMPVRTAKSLVTVLGIPQKPIITGYKSSLREKDTA TLNCQSSGSKPAARLTWRKGDQELHGEPTRIQEDPNGKTFTVSSSVTFQVTRE DDGASIVCSVNHESLKGADRSTSQRIEVLYTPTAMIRPDPPHPREGQKLLLHC EGRGNPVPQQYLWEKEGSVPPLKMTQESALIFPFLNKSDSGTYGCTATSNMG SYKAYYTLNVNDPSPVPSSSSTYHAIIG (SEQ ID NO:1238); and/or 3.) The anticipated leader sequence of the B7-H4 protein: MGAPAASLLLLLLLFACCWAPGGA (SEQ ID NO:1239). Polynucleotides encoding these polypeptides are also encompassed by the invention, as are antibodies that bind one or more of these polypeptides.

[0881] Also preferred are polypeptides comprising, or alternatively consisting of, fragments of the mature extracellular portion of the B7-H4 protein demonstrating functional activity (SEQ ID NO:361). Polynucleotides encoding these polypeptides are also encompassed by the invention. By functional activity is meant, a polypeptide fragment capable of displaying one or more known functional activities associated with the full-length (complete) B7-H4 protein. Such functional activities include, but are not limited to, biological activity (e.g., T cell costimulatory activity, ability to bind ICOS, and ability to induce or inhibit cytokine production), antigenicity [ability to bind (or compete with a B7-H4 polypeptide for binding) to an anti-B7-H4 antibody], immunogenicity (ability to generate antibody which binds to a B7-H4 polypeptide), ability to form multimers with B7-H4 polypeptides of the invention, and ability to bind to a receptor or ligand for a B7-H4 polypeptide.

[0882] FIGS. 3A-C show the nucleotide (SEQ ID NO:123) and deduced amino acid sequence (SEQ ID NO:361) corresponding to this gene.

[0883] FIG. 4 shows an analysis of the amino acid sequence (SEQ ID NO:361). Alpha, beta, turn and coil regions; hydrophilicity and hydrophobicity; amphipathic regions; flexible regions; antigenic index and surface probability are shown, and all were generated using the default settings of the recited computer algorithms. In the “Antigenic Index or Jameson-Wolf” graph, the positive peaks indicate locations of the highly antigenic regions of the protein, i.e., regions from which epitope-bearing peptides of the invention can be obtained. Polypeptides comprising, or alternatively consisting of, domains defined by these graphs are contemplated by the present invention, as are polynucleotides encoding these polypeptides.

[0884] The data presented in FIG. 4 are also represented in tabular form in Table 4. The columns are labeled with the headings “Res”, “Position”, and Roman Numerals I-XIV. The column headings refer to the following features of the amino acid sequence presented in FIGS. 3A-3C, and Table 4: “Res”: amino acid residue of SEQ ID NO: 361 and FIGS. 3A-3C; “Position”: position of the corresponding residue within SEQ ID NO:361 and FIGS. 3A-3C; I: Alpha, Regions—Garnier-Robson; II: Alpha, Regions—Chou-Fasman; III: Beta, Regions—Garnier-Robson; IV: Beta, Regions—Chou-Fasman; V: Turn, Regions—Garnier-Robson; VI: Turn, Regions—Chou-Fasman; VII: Coil, Regions—Garnier-Robson; VIII: Hydrophilicity Plot—Kyte-Doolittle; IX: Hydrophobicity Plot—Hopp-Woods; X: Alpha, Amphipathic Regions—Eisenberg; XI: Beta, Amphipathic Regions—Eisenberg; XII: Flexible Regions—Karplus-Schulz; XIII: Antigenic Index—Jameson-Wolf; and XIV: Surface Probability Plot—Emini.

[0885] Preferred embodiments of the invention in this regard include fragments that comprise, or alternatively consisting of, one or more of the following regions: alpha-helix and alpha-helix forming regions (“alpha-regions”), beta-sheet and beta-sheet forming regions (“beta-regions”), turn and turn-forming regions (“turn-regions”), coil and coil-forming regions (“coil-regions”), hydrophilic regions, hydrophobic regions, alpha amphipathic regions, beta amphipathic regions, flexible regions, surface-forming regions and high antigenic index regions. The data representing the structural or functional attributes of the protein set forth in FIG. 4 and/or Table 4, as described above, was generated using the various modules and algorithms of the DNA* STAR set on default parameters. In a preferred embodiment, the data presented in columns VIII, IX, XIII, and XIV of Table 4 can be used to determine regions of the protein which exhibit a high degree of potential for antigenicity. Regions of high antigenicity are determined from the data presented in columns VIII, IX, XIII, and/or XIV by choosing values which represent regions of the polypeptide which are likely to be exposed on the surface of the polypeptide in an environment in which antigen recognition may occur in the process of initiation of an immune response.

[0886] Certain preferred regions in these regards are set out in FIG. 4, but may, as shown in Table 4, be represented or identified by using tabular representations of the data presented in FIG. 4. The DNA*STAR computer algorithm used to generate FIG. 4 (set on the original default parameters) was used to present the data in FIG. 4 in a tabular format (See Table 4). The tabular format of the data in FIG. 4 is used to easily determine specific boundaries of a preferred region.

[0887] The present invention is further directed to fragments of the polynucleotide sequences described herein. By a fragment of, for example, the polynucleotide sequence of a deposited cDNA or the nucleotide sequence shown in SEQ ID NO: 123, is intended polynucleotide fragments at least about 15 nt, and more preferably at least about 20 nt, at least about 25 nt, still more preferably at least about 30 nt, at least about 35 nt, and even more preferably, at least about 40 nt in length, at least about 45 nt in length, at least about 50 nt in length, at least about 60 nt in length, at least about 70 nt in length, at least about 80 nt in length, at least about 90 nt in length, at least about 100 nt in length, at least about 125 nt in length, at least about 150 nt in length, at least about 175 nt in length, which are useful as diagnostic probes and primers as discussed herein. Of course, larger fragments 200-1500 nt in length are also useful according to the present invention, as are fragments corresponding to most, if not all, of the nucleotide sequence of a deposited cDNA or as shown in SEQ ID NO:123. By a fragment at least 20 nt in length, for example, is intended fragments which include 20 or more contiguous bases from the nucleotide sequence of a deposited cDNA or the nucleotide sequence as shown in SEQ ID NO:123. In this context “about” includes the particularly recited size, an sizes larger or smaller by several (5, 4, 3, 2, or 1) nucleotides, at either terminus or at both termini. Representative examples of polynucleotide fragments of the invention include, for example, fragments that comprise, or alternatively, consist of, a sequence from about nucleotide 1 to about 50, from about 51 to about 100, from about 101 to about 150, from about 151 to about 200, from about 201 to about 250, from about 251 to about 300, from about 301 to about 350, from about 351 to about 400, from about 401 to about 450, from about 451 to about 500, and from about 501 to about 550, and from about 551 to about 600, from about 601 to about 650, from about 651 to about 700, from about 701 to about 750, from about 751 to about 800, and from about 801 to about 860, of SEQ ID NO: 123, or the complementary strand thereto, or the cDNA contained in a deposited clone. In this context “about” includes the particularly recited ranges, and ranges larger or smaller by several (5, 4, 3, 2, or 1) nucleotides, at either terminus or at both termini. In additional embodiments, the polynucleotides of the invention encode functional attributes of the corresponding protein.

[0888] Preferred polypeptide fragments of the invention comprise, or alternatively consist of, the secreted protein having a continuous series of deleted residues from the amino or the carboxyl terminus, or both. Particularly, N-terminal deletions of the polypeptide can be described by the general formula m-432 where m is an integer from 2 to 426, where m corresponds to the position of the amino acid residue identified in SEQ ID NO:361. More in particular, the invention provides polynucleotides encoding polypeptides comprising, or alternatively consisting of, an amino acid sequence selected from the group: G-2 to I-432; A-3 to I-432; P-4 to I-432; A-5 to I-432; A-6 to I-432; S-7 to I-432; L-8 to I-432; L-9 to I-432; L-10 to I-432; L-11 to I-432; L-12 to I-432; L-13 to I-432; L-14 to I-432; F-15 to I-432; A-16 to I-432; C-17 to I-432; C-18 to I-432; W-19 to I-432; A-20 to I-432; P-21 to I-432; G-22 to I-432; G-23 to I-432; A-24 to I-432; N-25 to I-432; L-26 to I-432; S-27 to I-432; Q-28 to I-432; D-29 to I-432; G-30 to I-432; Y-31 to [-432; W-32 to I-432; Q-33 to I-432; E-34 to I-432; Q-35 to I-432; D-36 to I-432; L-37 to I-432; E-38 to I-432; L-39 to I-432; G-40 to I-432; T-41 to I-432; L-42 to I-432; A-43 to I-432; P-44 to I-432; L-45 to I-432; D-46 to I-432; E-47 to I-432; A-48 to I-432; I-49 to I-432; S-50 to I-432; S-51 to I-432; T-52 to I-432; V-53 to I-432; W-54 to I-432; S-55 to I-432; S-56 to I-432; P-57 to I-432; D-58 to I-432; M-59 to I-432; L-60 to I-432; A-61 to I-432; S-62 to I-432; Q-63 to I-432; D-64 to I-432; S-65 to I-432; Q-66 to I-432; P-67 to I-432; W-68 to I-432; T-69 to I-432; S-70 to I-432; D-71 to I-432; E-72 to I-432; T-73 to I-432; V-74 to I-432; V-75 to I-432; A-76 to I-432; G-77 to I-432; G-78 to I-432; T-79 to I-432; V-80 to I-432; V-81 to I-432; L-82 to I-432; K-83 to I-432; C-84 to I-432; Q-85 to I-432; V-86 to I-432; K-87 to I-432; D-88 to I-432; H-89 to I-432; E-90 to I-432; D-91 to I-432; S-92 to I-432; S-93 to I-432; L-94 to I-432; Q-95 to I-432; W-96 to I-432; S-97 to I-432; N-98 to I-432; P-99 to I-432; A-100 to I-432; Q-101 to I-432; Q-102 to I-432; T-103 to I-432; L-104 to I-432; Y-105 to I-432; F-106 to I-432; G-107 to I-432; E-108 to I-432; K-109 to I-432; R-110 to I-432; A-111 to I-432; L-112 to I-432; R-113 to I-432; D-114 to I-432; N-115 to I-432; R-116 to I-432; I-117 to I-432; Q-118 to I-432; L-119 to I-432; V-120 to I-432; T-121 to I-432; S-122 to I-432; T-123 to I-432; P-124 to I-432; H-125 to I-432; E-126 to I-432; L-127 to I-432; S-128 to I-432; I-129 to I-432; S-130 to I-432; I-131 to I-432; S-132 to I-432; N-133 to I-432; V-134 to I-432; A-135 to I-432; L-136 to I-432; A-137 to I-432; D-138 to I-432; E-139 to I-432; G-140 to I-432; E-141 to I-432; Y-142 to I-432; T-143 to I-432; C-144 to I-432; S-145 to I-432; I-146 to I-432; F-147 to I-432; T-148 to I-432; M-149 to I-432; P-150 to I-432; V-151 to I-432; R-152 to I-432; T-153 to I-432; A-154 to I-432; K-155 to I-432; S-156 to I-432; L-157 to I-432; V-158 to I-432; T-159 to I-432; V-160 to I-432; L-161 to I-432; G-162 to I-432; L-163 to I-432; P-164 to I-432; Q-165 to I-432; K-166 to I-432; P-167 to I-432; I-168 to I-432; I-169 to I-432; T-170 to I-432; G-171 to I-432; Y-172 to I-432; K-173 to I-432; S-174 to I-432; S-175 to I-432; L-176 to I-432; R-177 to I-432; E-178 to I-432; K-179 to I-432; D-180 to I-432; T-181 to I-432; A-182 to I-432; T-183 to I-432; L-184 to I-432; N-185 to I-432; C-186 to I-432; Q-187 to I-432; S-188 to I-432; S-189 to I-432; G-190 to I-432; S-191 to I-432; K-192 to I-432; P-193 to I-432; A-194 to [-432; A-195 to I-432; R-196 to I-432; L-197 to I-432; T-198 to I-432; W-199 to I-432; R-200 to I-432; K-201 to I-432; G-202 to I-432; D-203 to I-432; Q-204 to I-432; E-205 to I-432; L-206 to I-432; H-207 to I-432; G-208 to I-432; E-209 to I-432; P-210 to I-432; T-211 to I-432; R-212 to I-432; I-213 to I-432; Q-214 to I-432; E-215 to I-432; D-216 to I-432; P-217 to I-432; N-218 to I-432; G-219 to I-432; K-220 to I-432; T-221 to I-432; F-222 to I-432; T-223 to I-432; V-224 to I-432; S-225 to I-432; S-226 to I-432; S-227 to I-432; V-228 to I-432; T-229 to I-432; F-230 to I-432; Q-231 to I-432; V-232 to I-432; T-233 to I-432; R-234 to I-432; E-235 to I-432; D-236 to I-432; D-237 to I-432; G-238 to I-432; A-239 to I-432; S-240 to I-432; I-241 to I-432; V-242 to I-432; C-243 to I-432; S-244 to I-432; V-245 to I-432; N-246 to I-432; H-247 to I-432; E-248 to I-432; S-249 to I-432; L-250 to I-432; K-251 to I-432; G-252 to 1'432; A-253 to I-432; D-254 to I-432; R-255 to I-432; S-256 to I-432; T-257 to I-4:32; S-258 to I-432; Q-259 to I-432; R-260 to I-432; I-261 to I-432; E-262 to I-432; V-263 to I-432; L-264 to I-432; Y-265 to I-432; T-266 to I-432; P-267 to I-432; T-268 to I-432; A-269 to I-432; M-270 to I-432; I-271 to I-432; R-272 to I-432; P-273 to I-432; D-274 to I-432; P-275 to I-432; P-276 to I-432; H-277 to I-432; P-278 to I-432; R-279 to I-432; E-280 to I-432; G-281 to I-432; Q-282 to I-432; K-283 to I-432; L-284 to I-432; L-285 to I-432; L-286 to I-432; H-287 to I-432; C-288 to I-432; E-289 to I-432; G-290 to I-432; R-291 to I-432; G-292 to I-432; N-293 to I-432; P-294 to I-432; V-295 to I-432; P-296 to I-432; Q-297 to I-432; Q-298 to I-432; Y-299 to I-432; L-300 to I-432; W-301 to I-432; E-302 to I-432; K-303 to I-432; E-304 to I-432; G-305 to I-432; S-306 to I-432; V-307 to I-432; P-308 to I-432; P-309 to I-432; L-310 to I-432; K-311 to I-432; M-312 to I-432; T-313 to I-432; Q-314 to I-432; E-315 to [-432; S-316 to I-432; A-317 to I-432; L-318 to I-432; I-319 to I-432; F-320 to I-432; P-321 to I-432; F-322 to I-432; L-323 to I-432; N-324 to I-432; K-325 to I-432; S-326 to I-432; D-327 to I-432; S-328 to I-432; G-329 to I-432; T-330 to I-432; Y-331 to I-432; G-332 to I-432; C-333 to I-432; T-334 to I-432; A-335 to I-432; T-336 to I-432; S-337 to I-432; N-338 to I-432; M-339 to I-432; G-340 to I-432; S-341 to I-432; Y-342 to I-432; K-343 to I-432; A-344 to I-432; Y-345 to I-432; Y-346 to I-432; [-347 to I-432; L-348 to I-432; N-349 to I-432; V-350 to I-432; N-351 to I-432; D-352 to I-432; P-353 to I-432; S-354 to I-432; P-355 to I-432; V-356 to I-432; P-357 to I-432; S-358 to I-432; S-359 to I-432; S-360 to I-432; S-361 to I-432; T-362 to I-432; Y-363 to I-432; H-364 to I-432; A-365 to I-432; I-366 to I-432; I-367 to I-432; G-368 to I-432; G-369 to I-432; I-370 to I-432; V-371 to I-432; A-372 to I-432; F-373 to I-432; I-374 to I-432; V-375 to I-432; F-376 to I-432; L-377 to I-432; L-378 to I-432; L-379 to I-432; I-380 to I-432; M-381 to I-432; L-382 to I-432; I-383 to I-432; F-384 to I-432; L-385 to I-432; G-386 to I-432; H-387 to I-432; Y-388 to I-432; L-389 to 1]432; I-390 to I-432; R-391 to I-432; H-392 to I-432; K-393 to I-432; G-394 to I-432; T-395 to I-432; Y-396 to I-432; L-397 to I-432; T-398 to I-432; H-399 to I-432; E-400 to I-432; A-401 to I-432; K-402 to I-432; G-403 to I-432; S-404 to I-432; D-405 to I-432; D-406 to I-432; A-407 to I-432; P-408 to I-432; D-409 to I-432; A-410 to I-432; D-411 to I-432; T-412 to I-432; A-413 to I-432; I-414 to I-432; I-415 to I-432; N-416 to I-432; A-417 to I-432; E-418 to I-432; G-419 to I-432; G-420 to I-432; Q-421 to I-432; S-422 to I-432; G-423 to I-432; G-424 to I-432; D-425 to I-432; D-426 to I-432; and/or K-427 to I-432 of SEQ ID NO:361. Polypeptides encoded by these polynucleotides are also encompassed by the invention.

[0889] Additionally, the invention provides polynucleotides encoding polypeptides comprising, or alternatively consisting of, an amino acid sequence selected from the following group of C-terminal deletions: M-1 to F-431; M-1 to Y-430; M-1 to E-429; M-1 to K-428; M-1 to K-427; M-1 to D-426; M-1 to D-425; M-1 to G-424; M-1 to G-423; M-1 to S-422; M-1 to Q-421; M-1 to G-420; M-1 to I-419; M-1 to E-418; M-1 to A-417; M-1 to N-416; M-1 to I-415; M-1 to I-414; M-1 to A-413; M-1 to T-412; M-1 to D-411; M-1 to A-410; M-1 to D-409; M-1 to P-408; M-1 to A-407; M-1 to D-406; M-1 to D-405; M-1 to S-404; M-1 to G-403; M-1 to K-402; M-1 to A-401; M-1 to E-400; M-1 to H-399; M-1 to T-398; M-1 to L-397; M-1 to Y-396; M-1 to T-395; M-1 to G-394; M-1 to K-393; M-1 to H-392; M-1 to R-391; M-1 to I-390; M-1 to L-389; M-1 to Y-388; M-1 to H-387; M-1 to G-386; M-1 to L-385; M-1 to F-384; M-1 to I-383; M-1 to L-382; M-1 to M-381; M-1 to I-380; M-1 to L-379; M-1 to L-378; M-1 to L-377; M-1 to F-376; M-1 to V-375; M-1 to I-374; M-1 to F-373; M-1 to A-372; M-1 to V-371; M-1 to I-370; M-1 to G-369; M-1 to G-368; M-1 to I-367; M-1 to I-366; M-1 to A-365; M-1 to H-364; M-1 to Y-363; M-1 to T-362; M-1 to S-361; M-1 to S-360; M-1 to S-359; M-1 to S-358; M-1 to P-357; M-1 to V-356; M-1 to P-355; M-1 to S-354; M-1 to P-353; M-1 to D-352; M-1 to N-351; M-1 to V-350; M-1 to N-349; M-1 to L-348; M-1 to T-347; M-1 to Y-346; M-1 to I-345; M-1 to A-344; M-1 to K-343; M-1 to Y-342; M-1 to S-341; M-1 to G-340; M-1 to M-339; M-1 to N-338; M-1 to S-337; M-1 to T-336; M-1 to A-335; M-1 to T-334; M-1 to C-333; M-1 to G-332; M-1 to Y-331; M-1 to T-330; M-1 to G-329; M-1 to I-328; M-1 to D-327; M-1 to S-326; M-1 to K-325; M-1 to N-324; M-1 to L-323; M-1 to F-322; M-1 to P-321; M-1 to F-320; M-1 to I-319; M-1 to L-318; M-1 to A-317; M-1 to S-316; M-1 to E-315; M-1 to Q-314; M-1 to T-313; M-1 to M-312; M-1 to K-311; M-1 to L-310; M-1 to P-309; M-1 to P-308; M-1 to V-307; M-1 to S-306; M-1 to G-305; M-1 to E-304; M-1 to K-303; M-1 to E-302; M-1 to W-301; M-1 to L-300; M-1 to Y-299; M-1 to Q-298; M-1 to Q-297; M-1 to P-296; M-1 to V-295; M-1 to P-294; M-1 to N-293; M-1 to G-292; M-1 to R-291; M-1 to G-290; M-1 to E-289; M-1 to C-288; M-1 to H-287; M-1 to L-286; M-1 to L-285; M-1 to L-284; M-1 to K-283; M-1 to Q-282; M-1 to G-281; M-1 to E-280; M-1 to R-279; M-1 to P-278; M-1 to H-277; M-1 to P-276; M-1 to P-275; M-1 to D-274; M-1 to P-273; M-1 to R-272; M-1 to I-271; M-1 to M-270; M-1 to A-269; M-1 to T-268; M-1 to P-267; M-1 to T-266; M-1 to Y-265; M-1 to L-264; M-1 to V-263; M-1 to E-262; M-1 to I-261; M-1 to R-260; M-1 to Q-259; M-1 to S-258; M-1 to T-257; M-1 to S-256; M-1 to R-255; M-1 to D-254; M-1 to A-253; M-1 to G-252; M-1 to K-251; M-1 to L-250; M-1 to S-249; M-1 to E-248; M-1 to H-247; M-1 to N-246; M-1 to V-245; M-1 to S-244; M-1 to C-243; M-1 to V-242; M-1 to I-241; M-1 to S-240; M-1 to A-239; M-1 to G-238; M-1 to D-237; M-1 to D-236; M-1 to E-235; M-1 to R-234; M-1 to T-233; M-1 to V-232; M-1 to Q-231; M-1 to F-230; M-1 to T-229; M-1 to V-228; M-1 to S-227; M-1 to S-226; M-1 to S-225; M-1 to V-224; M-1 to T-223; M-1 to F-222; M-1 to T-221; M-1 to K-220; M-1 to G-219; M-1 to N-218; M-1 to P-217; M-1 to D-216; M-1 to E-215; M-1 to Q-214; M-1 to I-213; M-1 to R-212; M-1 to T-211; M-1 to P-210; M-1 to E-209; M-1 to G-208; M-1 to H-207; M-1 to L-206; M-1 to E-205; M-1 to Q-204; M-1 to D-203; M-1 to G-202; M-1 to K-201; M-1 to R-200; M-1 to W-199; M-1 to T-198; M-1 to L-197; M-1 to R-196; M-1 to A-195; M-1 to A-194; M-1 to P-193; M-1 to K-192; M-1 to S-191; M-1 to G-190; M-1 to S-189; M-1 to S-188; M-1 to Q-187; M-1 to C-186; M-1 to N-185; M-1 to L-184; M-1 to T-183; M-1 to A-182; M-1 to T-181; M-1 to D-180; M-1 to K-179; M-1 to E-178; M-1 to R-177; M-1 to L-176; M-1 to I-175; M-1 to S-174; M-1 to K-173; M-1 to Y-172; M-1 to G-171; M-1 to T-170; M-1 to I-169; M-1 to I-168; M-1 to P-167; M-1 to K-166; M-1 to Q-165; M-1 to P-164; M-1 to I-163; M-1 to G-162; M-1 to L-161; M-1 to V-160; M-1 to T-159; M-1 to VI-158; M-1 to L-157; M-1 to S-156; M-1 to K-155; M-1 to A-154; M-1 to T-153; M-1 to R-152; M-1 to V-151; M-1 to P-150; M-1 to M-149; M-1 to T-148; M-1 to F-14,7; M-1 to I-146; M-1 to S-145; M-1 to C-144; M-1 to T-143; M-1 to Y-142; M-1 to F-141; M-1 to G-140; M-1 to E-139; M-1 to D-138; M-1 to A-137; M-1 to L-136; M-1 to A-135; M-1 to V-134; M-1 to N-133; M-1 to S-132; M-1 to I-131; M-1 to S-130; M-1 to I-129; M-1 to S-128; M-1 to L-127; M-1 to E-126; M-1 to H-125; M-1 to 1′-124; M-1 to T-123; M-1 to S-122; M-1 to T-121; M-1 to V-120; M-1 to L-119; M-1 to Q-118; M-1 to I-117; M-1 to R-116; M-1 to N-115; M-1 to D-114; M-1 to R-113; M-1 to L-112; M-1 to A-111; M-1 to R-110; M-1 to K-109; M-1 to E-108; M-1 to I-107; M-1 to F-106; M-1 to Y-105; M-1 to L-104; M-1 to T-103; M-1 to Q-102; M-1 to Q-101; M-1 to A-100; M-1 to P-99; M-1 to N-98; M-1 to S-97; M-1 to W-96; M-1 to Q-95; M-1 to L-94; M-11 to S-93; M-1 to S-92; M-1 to D-91; M-1 to E-90; M-1 to H-89; M-1 to D-88; M-1 to K-87; M-1 to V-86; M-1 to Q-85; M-1 to C-84; M-1 to K-83; M-1 to L-82; M-1 to V-81; M-1 to V-80; M-1 to T-79; M-1 to G-78; M-1 to G-77; M-1 to A-76; M-1 to V-75; M-1 to V-74; M-1 to T-73; M-1 to E-72; M-1 to D-71; M-1 to S-70; M-1 to T-69; M-1 to W-68; M-1 to P-67; M-1 to Q-66; M-1 to S-65; M-1 to D-64; M-1 to Q-63; M-1 to S-62; M-1 to A-61; M-1 to L-60; M-1 to M-59; M-1 to D-58; M-1 to P-57; M-1 to S-56; M-1 to S-55; M-1 to W-54; M-1 to V-53; M-1 to T-52; M-1 to S-51; M-1 to S-50; M-1 to I-49; M-1 to A-48; M-1 to E-47; M-1 to E)-46; M-1 to L-45; M-1 to P-44; M-1 to A-43; M-1 to L-42; M-1 to T-41; M-1 to G-40; M-1 to L-39; M-1 to E-38; M-1 to L-37; M-1 to D-36; M-1 to Q-35; M-1 to E-34; M-1 to Q-33; M-1 to W-32; M-1 to Y-31; M-1 to G-30; M-1 to D-29; M-1 to Q-28; M-1 to S-27; M-1 to L-26; M-1 to N-25; M-1 to A-24; M-1 to G-23; M-1 to G-22; M-1 to P-21; M-1 to A-20; M-1 to W-19; M-1 to C-18; M-1 to C-17; M-1 to A-16; M-1 to F-15; M-1 to L-14; M-1 to L-13; M-1 to L-12; M-1 to L-11; M-1 to L-10; M-1 to L-9; M-1 to L-8; and/or M-1 to S-7 of SEQ ID NO:361. Polypeptides encoded by these polynucleotides are also encompassed by the invention.

[0890] Also as mentioned above, even if deletion of one or more amino acids from the C-terminus of a protein results in modification of loss of one or more biological functions of the protein (e.g., ability to inhibit the Mixed Lymphocyte Reaction), other functional activities (e.g., biological activities, ability to multimerize, ability to bind ligand, ability to generate antibodies, ability to bind antibodies) may still be retained. For example, the ability of the shortened polypeptide to induce and/or bind to antibodies which recognize the complete or mature forms of the polypeptide generally will be retained when less than the majority of the residues of the complete or mature polypeptide are removed from the C-terminus. Whether a particular polypeptide lacking C-terminal residues of a complete polypeptide retains such immunologic activities can readily be determined by routine methods described herein and otherwise known in the art. It is not unlikely that a polypeptide with a large number of deleted C-terminal amino acid residues may retain some biological or immunogenic activities. In fact, peptides composed of as few as six amino acid residues may often evoke an immune response. Accordingly, the present invention further provides polypeptides having one or more residues deleted from the carboxyl terminus of the amino acid sequence of the polypeptide shown in FIGS. 3A-3C (SEQ ID NO:361), as described by the general formula 1-n, where n is an integer from 6 to 432, where n corresponds to the position of the amino acid residue identified in SEQ ID NO:361.

[0891] More in particular, the invention provides polynucleotides encoding polypeptides comprising, or alternatively consisting of, an amino acid sequence selected from the group of N-terminal deletions of the mature extracellular portion of the B7-H4 protein (SEQ ID NO:1238): L-26 to G-368; S-27 to G-368; Q-28 to G-368; D-29 to G-368; G-30 to G-368; Y-31 to G-368; W-32 to G-368; Q-33 to G-368; E-34 to G-368; Q-35 to G-368; D-36 to G-368; L-37 to G-368; E-38 to G-368; L-39 to G-368; G-40 to G-368; T-41 to G-368; L-42 to G-368; A-43 to G-368; P-44 to G-368; L-45 to G-368; D-46 to G-368; E-47 to G-368; A-48 to G-368; I-49 to G-368; S-50 to G-368; S-51 to G-368; T-52 to G-368; V-53 to G-368; W-54 to G-368; S-55 to G-368; S-56 to G-368; P-57 to G-368; D-58 to G-368; M-59 to G-368; L-60 to G-368; A-61 to G-368; S-62 to G-368; Q-63 to G-368; D-64 to G-368; S-65 to G-368; Q-66 to G-368; P-67 to G-368; W-68 to G-368; T-69 to G-368; S-70 to G-368; D-71 to G-368; E-72 to G-368; T-73 to G-368; V-74 to G-368; V-75 to G-368; A-76 to G-368; G-77 to G-368; G-78 to G-368; T-79 to G-368; V-80 to G-368; V-81 to G-368; L-82 to G-368; K-83 to G-368; C-84 to G-368; Q-85 to G-368; V-86 to G-368; K-87 to G-368; D-88 to G-368; H-89 to G-368; E-90 to G-368; D-91 to G-368; S-92 to G-368; S-93 to G-368; L-94 to G-368; Q-95 to G-368; W-96 to G-368; S-97 to G-368; N-98 to G-368; P-99 to G-368; A-100 to G-368; Q-101 to G-368; Q-102 to G-368; T-103 to G-368; L-104 to G-368; Y-105 to G-368; F-106 to G-368; G-107 to G-368; E-108 to G-368; K-109 to G-368; R-110 to G-368; A-111 to G-368; L-112 to G-368; R-113 to G-368; D-114 to G-368; N-115 to G-368; R-116 to G-368; I-117 to G-368; Q-118 to G-368; L-119 to G-368; V-120 to G-368; T-121 to G-368; S-122 to G-368; T-123 to G-368; P-124 to G-368; H-125 to G-368; E-126 to G-368; L-127 to G-368; S-128 to G-368; I-129 to G-368; S-130 to G-368; I-131 to G-368; S-132 to G-368; N-133 to G-368; V-134 to G-368; A-135 to G-368; L-136 to G-368; A-137 to G-368; D-138 to G-368; E-139 to G-368; G-140 to G-368; E-141 to G-368; Y-142 to G-368; T-143 to G-368; C-144 to G-368; S-145 to G-368; I-146 to G-368; F-147 to G-368; T-148 to G-368; M-149 to G-368; P-145 to G-368; V-151 to G-368; R-152 to G-368; T-153 to G-368; A-154 to G-368; K-155 to G-368; S-156 to G-368; L-157 to G-368; V-158 to G-368; T-159 to G-368; V-160 to G-368; L-161 to G-368; G-162 to G-368; I-163 to G-368; P-164 to G-368; Q-165 to G-368; K-166 to G-368; P-167 to G-368; I-168 to G-368; I-169 to G-368; T-170 to G-368; G-171 to G-368; Y-172 to G-368; K-173 to G-368; S-174 to G-368; S-175 to G-368; L-176 to G-368; R-177 to G-368; E-178 to G-368; K-179 to G-368; D-180 to G-368; T-181 to G-368; A-182 to G-368; T-183 to G-368; L-184 to G-368; N-185 to G-368; C-186 to G-368; Q-187 to G-368; S-188 to G-368; S-189 to G-368; G-190 to G-368; S-191 to G-368; K-192 to G-368; P-193 to G-368; A-194 to G-368; A-195 to G-368; R-196 to G-368; L-197 to G-368; T-198 to G-368; W-199 to G-368; R-200 to G-368; K-201 to G-368; G-202 to G-368; D-203 to G-368; Q-204 to G-368; E-205 to G-368; L-206 to G-368; H-207 to G-368; G-208 to G-368; E-209 to G-368; P-210 to G-368; T-211 to G-368; R-212 to G-368; I-213 to G-368; Q-214 to G-368; E-215 to G-368; D-216 to G-368; P-217 to G-368; N-218 to G-368; G-219 to G-368; K-220 to G-368; T-221 to G-368; F-222 to G-368; T-223 to G-368; V-224 to G-368; S-225 to G-368; S-226 to G-368; S-227 to G-368; V-228 to G-368; T-229 to G-368; F-230 to G-368; Q-231 to G-368; V-232 to G-368; T-233 to G-368; R-234 to G-368; E-235 to G-368; D-236 to G-368; D-237 to G-368; G-238 to G-368; A-239 to G-368; S-240 to G-368; I-241 to G-368; V-242 to G-368; C-243 to G-368; S-244 to G-368; V-245 to G-368; N-246 to G-368; H-247 to G-368; E-248 to G-368; S-249 to G-368; L-250 to G-368; K-251 to G-368; G-252 to G-368; A-253 to G-368; D-254 to G-368; R-255 to G-368; S-256 to G-368; T-257 to G-368; S-258 to G-368; Q-259 to G-368; R-260 to G-368; I-261 to G-368; E-262 to G-368; V-263 to G-368; L-264 to G-368; Y-265 to G-368; T-266 to G-368; P-267 to G-368; T-268 to G-368; A-269 to G-368; M-270 to G-368; I-271 to G-368; R-272 to G-368; P-273 to G-368; D-274 to G-368; P-275 to G-368; P-276 to G-368; H-277 to G-368; P-278 to I-368; R-279 to G-368; E-280 to G-368; G-281 to G-368; Q-282 to G-368; K-283 to G-368; L-284 to G-368; L-285 to G-368; L-286 to G-368; H-287 to G-368; C-288 to G-368; E-289 to G-368; G-290 to G-368; R-291 to G-368; G-292 to G-368; N-293 to G-368; P-294 to G-368; V-295 to G-368; P-296 to G-368; Q-297 to G-368; Q-298 to G-368; Y-299 to G-368; L-300 to G-368; W-301 to G-368; E-302 to G-368; K-303 to G-368; E-304 to G-368; G-305 to G-368; S-306 to G-368; V-307 to G-368; P-308 to G-368; P-309 to G-368; L-310 to G-368; K-311 to G-368; M-312 to G-368; T-313 to G-368; Q-314 to G-368; E-315 to G-368; S-316 to G-368; A-317 to G-368; L-318 to G-368; I-319 to G-368; F-320 to G-368; P-321 to G-368; F-322 to G-368; L-323 to G-368; N-324 to G-368; K-325 to G-368; S-326 to G-368; D-327 to G-368; S-328 to G-368; G-329 to G-368; T-330 to G-368; Y-331 to G-368; G-332 to G-368; C-333 to G-368; T-334 to G-368; A-335 to G-368; T-336 to G-368; S-337 to G-368; N-338 to G-368; M-339 to G-368; G-340 to G-368; S-341 to G-368; Y-342 to G-368; K-343 to G-368; A-344 to G-368; Y-345 to G-368; Y-346 to G-368; T-347 to G-368; L-348 to G-368; N-349 to G-368; V-350 to G-368; N-351 to G-368; D-352 to G-368; P-353 to G-368; S-354 to G-368; P-355 to G-368; V-356 to G-368; P-357 to G-368; S-358 to G-368; S-359 to G-368; S-360 to G-368; S-361 to G-368; T-362 to G-368; and/or Y-363 to G-368 of SEQ ID NO:1238. Polypeptides encoded by these polynucleotides are also encompassed by the invention.

[0892] Additionally, the invention provides polynucleotides encoding polypeptides comprising, or alternatively consisting of, an amino acid sequence selected from the group of C-terminal deletions of the mature extracellular portion of the B7-H4 protein (SEQ ID NO:1238): N-25 to I-367; N-25 to I-366; N-25 to A-365; N-25 to H-364; N-25 to Y-363; N-25 to T-362; N-25 to S-361; N-25 to S-360; N-25 to S-359; N-25 to S-358; N-25 to P-357; N-25 to V-356; N-25 to P-355; N-25 to S-354; N-25 to P-353; N-25 to D-352; N-25 to N-351; N-25 to V-350; N-25 to N-349; N-25 to L-348; N-25 to T-347; N-25 to Y-346; N-25 to Y-345; N-25 to A-344; N-25 to K-343; N-25 to Y-342; N-25 to S-341; N-25 to G-340; N-25 to M-339; N-25 to N-338; N-25 to S-337; N-25 to T-336; N-25 to A-335; N-25 to T-334; N-25 to C-333; N-25 to G-332; N-25 to Y-331; N-25 to T-330; N-25 to G-329; N-25 to S-328; N-25 to D-327; N-25 to S-326; N-25 to K-325; N-25 to N-324; N-25 to L-323; N-25 to F-322; N-25 to P-321; N-25 to F-320; N-25 to I-319; N-25 to L-318; N-25 to A-317; N-25 to S-316; N-25 to E-315; N-25 to Q-314; N-25 to T-313; N-25 to M-312; N-25 to K-311; N-25 to L-310; N-25 to P-309; N-25 to P-308; N-25 to V-307; N-25 to S-306; N-25 to G-305; N-25 to E-304; N-25 to K-303; N-25 to E-302; N-25 to S-301; N-25 to L-300; N-25 to Y-299; N-25 to Q-298; N-25 to Q-297; N-25 to P-296; N-25 to V-295; N-25 to P-294; N-25 to N-293; N-25 to G-292; N-25 to R-291; N-25 to G-290; N-25 to E-289; N-25 to C-288; N-25 to K-287; N-25 to L-286; N-25 to L-285; N-25 to L-284; N-25 to K-283; N-25 to Q-282; N-25 to G-281; N-25 to E-280; N-25 to R-279; N-25 to P-278; N-25 to N-277; N-25 to P-276; N-25 to P-275; N-25 to D-274; N-25 to P-273; N-25 to R-272; N-25 to I-271; N-25 to M-270; N-25 to A-269; N-25 to T-268; N-25 to P-267; N-25 to T-266; N-25 to Y-265; N-25 to L-264; N-25 to V-263; N-25 to E-262; N-25 to I-261; N-25 to R-260; N-25 to Q-259; N-25 to S-258; N-25 to T-257; N-25 to K-256; N-25 to R-255; N-25 to D-254; N-25 to A-253; N-25 to G-252; N-25 to K-251; N-25 to L-250; N-25 to S-249; N-25 to E-248; N-25 to D-247; N-25 to N-246; N-25 to V-245; N-25 to S-244; N-25 to C-243; N-25 to V-242; N-25 to I-241; N-25 to S-240; N-25 to A-239; N-25 to G-238; N-25 to D-237; N-25 to D-236; N-25 to E-235; N-25 to R-234; N-25 to T-233; N-25 to V-232; N-25 to Q-231; N-25 to F-230; N-25 to T-229; N-25 to V-228; N-25 to S-227; N-25 to A-226; N-25 to S-225; N-25 to V-224; N-25 to T-223; N-25 to F-222; N-25 to T-221; N-25 to K-220; N-25 to G-219; N-25 to N-218; N-25 to P-217; N-25 to D-216; N-25 to E-215; N-25 to Q-214; N-25 to I-213; N-25 to R-212; N-25 to T-211; N-25 to P-210; N-25 to E-209; N-25 to G-208; N-25 to R-207; N-25 to L-206; N-25 to E-205; N-25 to Q-204; N-25 to D-203; N-25 to G-202; N-25 to K-201; N-25 to R-200; N-25 to W-199; N-25 to T-198; N-25 to L-197; N-25 to R-196; N-25 to A-195; N-25 to A-194; N-25 to P-193; N-25 to K-192; N-25 to S-191; N-25 to G-190; N-25 to S-189; N-25 to S-188; N-25 to Q-187; N-25 to C-186; N-25 to N-185; N-25 to L-184; N-25 to T-183; N-25 to A-182; N-25 to T-181; N-25 to D-180; N-25 to K-179; N-25 to E-178; N-25 to R-177; N-25 to L-176; N-25 to S-175; N-25 to S-174; N-25 to K-173; N-25 to Y-172; N-25 to G-171; N-25 to T-170; N-25 to I-169; N-25 to I-168; N-25 to P-167; N-25 to K-166; N-25 to Q-165; N-25 to P-164; N-25 to I-163; N-25 to G-162; N-25 to L-161; N-25 to V-160; N-25 to T-159; N-25 to V-158; N-25 to L-157; N-25 to S-156; N-25 to K-155; N-25 to A-154; N-25 to T-153; N-25 to R-152; N-25 to V-151; N-25 to P-150; N-25 to M-149; N-25 to T-148; N-25 to F-147; N-25 to I-146; N-25 to S-145; N-25 to C-144; N-25 to T-143; N-25 to Y-142; N-25 to E-141; N-25 to G-140; N-25 to E-139; N-25 to D-138; N-25 to A-137; N-25 to L-136; N-25 to A-135; N-25 to V-134; N-25 to N-133; N-25 to S-132; N-25 to I-131; N-25 to A-130; N-25 to I-129; N-25 to S-128; N-25 to L-127; N-25 to E-126; N-25 to H-125; N-25 to P-124; N-25 to T-123; N-25 to S-122; N-25 to T-121; N-25 to V-120; N-25 to L-119; N-25 to Q-118; N-25 to I-117; N-25 to R-116; N-25 to N-115; N-25 to D-114; N-25 to R-113; N-25 to L-112; N-25 to A-111; N-25 to R-10; N-25 to K-109; N-25 to E-108; N-25 to G-107; N-25 to F-106; N-25 to Y-105; N-25 to L-104; N-25 to T-103; N-25 to Q-102; N-25 to Q-101; N-25 to A-100; N-25 to P-99; N-25 to N-98; N-25 to S-97; N-25 to W-96; N-25 to Q-95; N-25 to L-94; N-25 to S-93; N-25 to N-92; N-25 to D-91; N-25 to E-90; N-25 to H-89; N-25 to D-88; N-25 to K-87; N-25 to V-86; N-25 to Q-85; N-25 to C-84; N-25 to K-83; N-25 to L-82; N-25 to V-81; N-25 to V-80; N-25 to T-79; N-25 to G-78; N-25 to G-77; N-25 to A-76; N-25 to V-75; N-25 to V-74; N-25 to T-73; N-25 to E-72; N-25 to D-71; N-25 to S-70; N-25 to T-69; N-25 to W-68; N-25 to P-67; N-25 to Q-66; N-25 to S-65; N-25 to D-64; N-25 to Q-63; N-25 to S-62; N-25 to A-61; N-25 to L-60; N-25 to M-59; N-25 to D-58; N-25 to P-57; N-25 to S-56; N-25 to S-55; N-25 to W-54; N-25 to V-53; N-25 to T-52; N-25 to S-51; N-25 to S-50; N-25 to I-49; N-25 to A-48; N-25 to E-47; N-25 to D-46; N-25 to L-45; N-25 to P-44; N-25 to A-43; N-25 to L-42; N-25 to T-41; N-25 to G-40; N-25 to L-39; N-25 to E-38; N-25 to L-37; N-25 to D-36; N-25 to Q-35; N-25 to E-34; N-25 to Q-33; N-25 to W-32; and/or N-25 to Y-31 of SEQ ID NO:1238. Polypeptides encoded by these polynucleotides are also encompassed by the invention.

[0893] In addition, any of the above listed N- or C-terminal deletions can be combined to produce a N- and C-terminal deleted polypeptide. The invention also provides polypeptides comprising, or alternatively consisting of, one or more amino acids deleted from both the amino and the carboxyl termini, which may be described generally as having residues m-n of SEQ ID NO:361, where n and m are integers as described above. Polynucleotides encoding these polypeptides are also encompassed by the invention.

[0894] The present invention is also directed to proteins containing polypeptides at least 80%, 85%, 90%, 92%, 93%, 94%, 95%, 96%, 97%, 98% or 99% identical to a polypeptide sequence set forth herein as m-n. In preferred embodiments, the application is directed to proteins containing polypeptides at least 80%, 85%, 90%, 95%, 96%, 97%, 98% or 99% identical to polypeptides having the amino acid sequence of the specific N- and C-terminal deletions recited herein. Polynucleotides encoding these polypeptides are also encompassed by the invention.

[0895] Also included are polynucleotide sequences encoding a polypeptide consisting of a portion of the complete amino acid sequence encoded by a cDNA clone contained in ATCC Deposit Nos. 209007 (deposited on Apr. 28, 1997) and 209083 (deposited on May 29, 1997), where this portion excludes any integer of amino acid residues from 1 to about 228 amino acids from the amino terminus of the complete amino acid sequence encoded by a cDNA clone contained in ATCC Deposit Nos. 209007 and 209083, or any integer of amino acid residues from 1 to about 228 amino acids from the carboxyl terminus, or any combination of the above amino terminal and carboxyl terminal deletions, of the complete amino acid sequence encoded by the cDNA clone contained in ATCC Deposit Nos. 209007 and 209083. Polypeptides encoded by these polynucleotides also are encompassed by the invention.

[0896] As described herein or otherwise known in the art, the polynucleotides of the invention have uses that include, but are not limited to, serving as probes or primers in chromosome identification, chromosome mapping, and linkage analysis.

[0897] Polynucleotides and polypeptides of the invention are useful as reagents for differential identification of CNS and/or immune system tissue(s) or cell type(s) present in a biological sample and for diagnosis of diseases and conditions which include, but are not limited to, diseases and/or disorders involving immune system activation, stimulation and/or surveillance, particularly involving T cells and/or neutrophils, susceptibility to viral disease and diseases of the CNS, especially cancers of that system. Similarly, polypeptides and antibodies directed to these polypeptides are useful in providing immunological probes for differential identification of the tissue(s) or cell type(s). Particularly contemplated are the use of antibodies directed against the extracellular portion of this protein which act as antagonists and/or agonists for the activity of the B7-H4 protein. Such antagonistic/agonist antibodies would be useful for the prevention and/or inhibition of such biological activities as are disclosed herein (e.g., T cell modulated activities).

[0898] For a number of disorders of the above tissues or cells, particularly of the immune system and CNS, expression of this gene at significantly higher or lower levels may be routinely detected in certain tissues or cell types (e.g., immune, CNS, cancerous and wounded tissues) or bodily fluids (e.g., lymph, serum, plasma, urine, synovial fluid and spinal fluid) or another tissue or cell sample taken from an individual having such a disorder, relative to the standard gene expression level, i.e., the expression level in healthy tissue or bodily fluid from an individual not having the disorder.

[0899] The homology to members of the B7 family of ligands indicates that the polynucleotides and polypeptides corresponding to this gene are useful for the diagnosis, detection and/or treatment of diseases and/or disorders involving immune system activation, stimulation and/or surveillance, particularly as relating to T cells and/or neutrophils. In particular, the translation product of the B7-H4 gene may be involved in the costimulation of T cells, binding to ICOS, and/or may play a role in modulation of the expression of particular cytokines.

[0900] More generally, this gene product may be involved in the regulation of cytokine production, antigen presentation, or other processes that may also suggest a usefulness in the treatment of cancer (e.g., by boosting immune responses). Since the gene is expressed in cells of lymphoid origin, the gene or protein, as well as, antibodies directed against the protein may show utility as a tumor marker and/or immunotherapy targets for the above listed tissues. Therefore it may be also used as an agent for immunological disorders including arthritis, asthma, immune deficiency diseases such as AIDS, leukemia, rheumatoid arthritis, inflammatory bowel disease, sepsis, acne, and psoriasis. In addition, this gene product may have commercial utility in the expansion of stem cells and committed progenitors of various blood lineages, and in the differentiation and/or proliferation of various cell types. Furthermore, the protein may also be used to determine biological activity, to raise antibodies, as tissue markers, to isolate cognate ligands or receptors, to identify agents that modulate their interactions, in addition to its use as a nutritional supplement.

[0901] The tissue distribution and homology to poliovirus receptor precursors suggests that the protein product of this clone would be useful for the treatment and prevention of diseases that involve the binding and uptake of virus particles for infection. It might also be helpful in genetic therapy where the goal is to insert foreign DNA into infected cells. With the help of this protein, the binding and uptake of this foreign DNA might be aided. In addition, it is expected that over expression of this gene will indicate abnormalities involving the CNS, particularly cancers of that system. Protein, as well as, antibodies directed against the protein may show utility as a tumor marker and/or immunotherapy targets for the above listed tissues.

[0902] Many polynucleotide sequences, such as EST sequences, are publicly available and accessible through sequence databases. Some of these sequences are related to SEQ ID NO:123 and may have been publicly available prior to conception of the present invention. Preferably, such related polynucleotides are specifically excluded from the scope of the present invention. To list every related sequence would be cumbersome. Accordingly, preferably excluded from the present invention are one or more polynucleotides comprising a nucleotide sequence described by the general formula of a-b, where a is any integer between 1 to 2523 of SEQ ID NO:123, b is an integer of 15 to 2537, where both a and b correspond to the positions of nucleotide residues shown in SEQ ID NO:123

[0903] Features of Protein Encoded by Gene No: 114 The translation product of this gene shares sequence homology with Y087_CAEEL hypothetical 28.5 KD protein ZK1236.7 in chromosome III of Caenorhabditis elegans in addition to alpha-1 collagen type III (See Genbank Accession No. gi|537432). In specific embodiments, polypeptides of the invention comprise, or alternatively consists of, an amino acid sequence selected from the group: VPELPDRVHQLHQAVQGCALGRPGFPGGPTHSGHHKSHPGPAGGDYNRCDR PGQVHLHNPRGTGRRGQLHPTAGPGVHRRACPSQQLPHRLGPGVPCPSPSLT PVLPSWTQSWCGLPGYTSSS (SEQ ID NO:954), VHQLHQAVQGCALGRPGFPGGP (SEQ ID NO:955), PTHSGHHKSHPGPAGGDYNRCDRPGQVHLHNPRGTGRRGQLH (SEQ ID NO:956), and/or LHPTAGPGVHRRACPSQQLPHRLGPGVPCPSPSLTPVLPSWTQSWCGLPGYTS SS (SEQ ID NO:957). Moreover, fragments and variants of these polypeptides (such as, for example, fragments as described herein, polypeptides at least 80%, 85%, 90%, 95%, 96%, 97%, 98%, or 99% identical to these polypeptides and polypeptides encoded by the polynucleotide which hybridizes, under stringent conditions, to the polynucleotide encoding these polypeptides) are encompassed by the invention. Antibodies that bind polypeptides of the invention are also encompassed by the invention. Polynucleotides encoding these polypeptides are also encompassed by the invention.

[0904] This gene is expressed primarily in brain cells, and to a lesser extent in activated B and T cells.

[0905] Polynucleotides and polypeptides of the invention are useful as reagents for differential identification of the tissue(s) or cell type(s) present in a biological sample and for diagnosis of diseases and conditions which include, but are not limited to, neurodegeneration and immunological disorders. Similarly, polypeptides and antibodies directed to these polypeptides are useful in providing immunological probes for differential identification of the tissue(s) or cell type(s). For a number of disorders of the above tissues or cells, particularly of the neural and immune systems, expression of this gene at significantly higher or lower levels may be routinely detected in certain tissues or cell types (e.g. brain, immune, cancerous and wounded tissues) or bodily fluids (e.g., lymph, serum, plasma, urine, synovial fluid and spinal fluid) or another tissue or cell sample taken from an individual having such a disorder, relative to the standard gene expression level, i.e., the expression level in healthy tissue or bodily fluid from an individual not having the disorder.

[0906] Predicted epitopes include those comprising a sequence shown in SEQ ID NO:362 as residues: Glu-34 to Glu-39, Gly-51 to Ser-72, Ala-88 to Glu-93, Gln-100 to Val-105.

[0907] The tissue distribution in brain cells, combined with the homology to Y087_CAEEL hypothetical 28.5 KD protein ZK1236.7 in chromosome III of Caenorhabditis elegans as well as to a conserved alpha-1 collagen type III protein indicates that the protein product of this gene is useful for the detection and treatment of neurodegenerative disease states and behavioral disorders such as Alzheimer's Disease, Parkinson's Disease, Huntington's Disease, schizophrenia, mania, dementia, paranoia, obsessive compulsive disorder and panic disorders. Because the gene is expressed in cells of lymphoid origin, the natural gene product may be involved in immune functions. Therefore it may be also used as an agent for immunological disorders including arthritis, asthma, immune deficiency diseases such as AIDS, and leukemia. Protein, as well as, antibodies directed against the protein may show utility as a tissue-specific marker and/or immunotherapy target for the above listed tissues.

[0908] Many polynucleotide sequences, such as EST sequences, are publicly available and accessible through sequence databases. Some of these sequences are related to SEQ ID NO:124 and may have been publicly available prior to conception of the present invention. Preferably, such related polynucleotides are specifically excluded from the scope of the present invention. To list every related sequence is cumbersome. Accordingly, preferably excluded from the present invention are one or more polynucleotides comprising a nucleotide sequence described by the general formula of a-b, where a is any integer between 1 to 1376 of SEQ ID NO:124, b is an integer of 15 to 1390, where both a and b correspond to the positions of nucleotide residues shown in SEQ ID NO:124, and where b is greater than or equal to a+14.

[0909] Features of Protein Encoded by Gene No: 115

[0910] The translation product of this gene shares sequence homology with alpha 3 type IX collagen, which is thought to be important in hyaline cartilage formation via its ability to uptake inorganic sulfate by cells (See Genbank Accession No. gi|975657).

[0911] In specific embodiments, polypeptides of the invention comprise, or alternatively consists of, an amino acid sequence selected from the group: SLRRPRSAAXQTLTTFLSSVSSASSSALPGSREPCDPIAPPPPRSGSAASCCSCC CSCPRRRAPLRSPRGSKRRIRQREVVDLYNGMCLQGPAGVPGRDGSPGANGI PGTPGIPGRDGFKGEKGECLRESFEESWTPNYKQCSWSSLNYGIDLGKIAECT FTKMRSNSALRVLFSGSLRLKCRNACCQRWYFTFNGAECSGPLPIEAIIYLDQ GSPEMNSTINIHRTSSVEGLCEGIGAGLVDVAIWVGTCSDYPKGDASTGWNS VSRIIIEELPK (SEQ ID NO:958), SLRRPRSAAXQTLTTFLSSVSSASSSALPGSREPCDPRAPPPPRSGSAASCCSCC CSCPRR (SEQ ID NO:959), RAPLRSPRGSKRRIRQREVVDLYNGMCLQGPAGVPGRDGSPGANGIPGTPGI (SEQ ID NO:960), TPGIPGRDGFKGEKGECLRESFEESWTPNYKQCSWSSLNYGIDLGKIAECTF (SEQ ID NO:961), FTKMRSNSALRVLFSGSLRLKCRNACCQRWYFTFNGAECSGPLPIEAIIYLDQ GSPEMNSTINIHR (SEQ ID NO:962), and/or RTSSVEGLCEGIGAGLVDVAIWVGTCSDYPKGDASTGWNSVSRIIIEELPK (SEQ ID NO:963). Moreover, fragments and variants of these polypeptides (such as, for example, fragments as described herein, polypeptides at least 80%, 85%, 90%, 95%, 96%, 97%, 98%, or 99% identical to these polypeptides and polypeptides encoded by the polynucleotide which hybridizes, under stringent conditions, to the polynucleotide encoding these polypeptides) are encompassed by the invention. Antibodies that bind polypeptides of the invention are also encompassed by the invention. Polynucleotides encoding these polypeptides are also encompassed by the invention.

[0912] This gene is expressed primarily in smooth muscle, and to a lesser extent in synovial tissue.

[0913] Polynucleotides and polypeptides of the invention are useful as reagents for differential identification of the tissue(s) or cell type(s) present in a biological sample and for diagnosis of diseases and conditions which include, but are not limited to, dwarfism, spinal deformation, and specific joint abnormalities as well as chondrodysplasias, i.e. spondyloepiphyseal dysplasia congenita, familial osteoarthritis, Atelosteogenesis type II, metaphyseal chondrodysplasia type Schmid and autoimmune disorders. Similarly, polypeptides and antibodies directed to these polypeptides are useful in providing immunological probes for differential identification of the tissue(s) or cell type(s). For a number of disorders of the above tissues or cells, particularly of the skeletal system, expression of this gene at significantly higher or lower levels may be routinely detected in certain tissues or cell types (e.g. muscle, synovial tissues, cancerous and wounded tissues) or bodily fluids (e.g., lymph, serum, plasma, urine, synovial fluid and spinal fluid) or another tissue or cell sample taken from an individual having such a disorder, relative to the standard gene expression level, i.e., the expression level in healthy tissue or bodily fluid from an individual not having the disorder.

[0914] The tissue distribution in smooth muscle, and homology to alpha 3 type IX collagen indicates that the protein product of this gene is useful for the treatment and diagnosis of diseases associated with the mutation in this gene which leads to the many different types of chondrodysplasias. By the use of this product, the abnormal growth and development of bones of the limbs and spine could be detected or treated in utero, since the protein or polypeptides thereof could affect epithelial cells early in development, and later the chondrocytes of the developing craniofacial structure. In addition, the expression of this gene product in synovium would suggest a role in the detection and treatment of disorders and conditions affecting the skeletal system, in particular osteoporosis as well as disorders afflicting connective tissues (e.g. arthritis, trauma, tendonitis, chrondomalacia and inflammation), such as in the diagnosis or treatment of various autoimmune disorders such as rheumatoid arthritis, lupus, scleroderma, and dermatomyositis as well as dwarfism, spinal deformation, and specific joint abnormalities as well as chondrodysplasias (i.e. spondyloepiphyseal dysplasia congenita, familial osteoarthritis, Atelosteogenesis type II, metaphyseal chondrodysplasia type Schmid). Moreover, the expression within smooth muscle indicates t that polynucleotides and polypeptides corresponding to this gene are useful for the treatment, detection, and/or prevention of a variety of vascular disorders, which include, but are not limited to, atherosclerosis, embolism, stroke, aneurysm, or microvascular disease. Protein, as well as, antibodies directed against the protein may show utility as a tumor marker and/or immunotherapy targets for the above listed tissues.

[0915] Many polynucleotide sequences, such as EST sequences, are publicly available and accessible through sequence databases. Some of these sequences are related to SEQ ID NO:125 and may have been publicly available prior to conception of the present invention. Preferably, such related polynucleotides are specifically excluded from the scope of the present invention. To list every related sequence is cumbersome. Accordingly, preferably excluded from the present invention are one or more polynucleotides comprising a nucleotide sequence described by the general formula of a-b, where a is any integer between 1 to 1274 of SEQ ID NO:125, b is an integer of 15 to 1288, where both a and b correspond to the positions of nucleotide residues shown in SEQ ID NO:125, and where b is greater than or equal to a+14.

[0916] Features of Protein Encoded by Gene No: 116

[0917] The translation product of this gene shares sequence homology with retrovirus-related reverse transcriptase, which is thought to be important in viral replication.

[0918] In specific embodiments, polypeptides of the invention comprise, or alternatively consists of, the following amino acid sequence: TKKENCRPASLMNIDTKILNKILMNQ (SEQ ID NO:964). Moreover, fragments and variants of this polypeptide (such as, for example, fragments as described herein, polypeptides at least 80%, 85%, 90%, 95%, 96%, 97%, 98%, or 99% identical to these polypeptides and polypeptides encoded by the polynucleotide which hybridize, under stringent conditions, to the polynucleotide encoding this polypeptide are encompassed by the invention. Antibodies that bind polypeptides of the invention are also encompassed by the invention. Polynucleotides encoding this polypeptide are also encompassed by the invention. (See Genbank Accession No. pir|A253|31GNHUL1).

[0919] This gene is expressed primarily in human meningima.

[0920] Polynucleotides and polypeptides of the invention are useful as reagents for differential identification of the tissue(s) or cell type(s) present in a biological sample and for diagnosis of diseases and conditions which include, but are not limited to, retroviral diseases such as AIDS, and possibly certain cancers due to transactivation of latent cell division genes. Similarly, polypeptides and antibodies directed to these polypeptides are useful in providing immunological probes for differential identification of the tissue(s) or cell type(s). For a number of disorders of the above tissues or cells, particularly of the immune system, expression of this gene at significantly higher or lower levels may be routinely detected in certain tissues or cell types (e.g. meningima, cancerous and wounded tissues) or bodily fluids (e.g., lymph, serum, plasma, urine, synovial fluid and spinal fluid) or another tissue or cell sample taken from an individual having such a disorder, relative to the standard gene expression level, i.e., the expression level in healthy tissue or bodily fluid from an individual not having the disorder.

[0921] The tissue distribution in human meningima, combined with the homology to a retrovirus-related reverse transcriptase indicates that the protein product of this gene is useful for the detection and treatment of diseases and conditions associated with retroviral infection, since a functional reverse transcriptase (RT) or RT-like molecule is an integral component of the retroviral life cycle. Protein, as well as, antibodies directed against the protein may show utility as a tumor marker and/or immunotherapy targets for the above listed tissues.

[0922] Many polynucleotide sequences, such as EST sequences, are publicly available and accessible through sequence databases. Some of these sequences are related to SEQ ID NO:126 and may have been publicly available prior to conception of the present invention. Preferably, such related polynucleotides are specifically excluded from the scope of the present invention. To list every related sequence is cumbersome. Accordingly, preferably excluded from the present invention are one or more polynucleotides comprising a nucleotide sequence described by the general formula of a-b, where a is any integer between 1 to 1503 of SEQ ID NO:126, b is an integer of 15 to 1517, where both a and b correspond to the positions of nucleotide residues shown in SEQ ID NO:126, and where b is greater than or equal to a+14.

[0923] Features of Protein Encoded by Gene No: 117

[0924] The translation product of this gene shares sequence homology with an unknown gene from C. elegans, as well as weak homolog with mammalian metaxin, a gene contiguous to both thrombospondin 3 and glucocerebrosidase, and is known to be required for embryonic development. Recently another group cloned and sequenced this gene from humans, naming it metaxin 2. It is thought that metaxin 1 and metaxin 2 interact, and are associated with the mammalian mitochondrial outer membrane (See Genbank Accession No. AF053551). In specific embodiments, polypeptides of the invention comprise, or alternatively consists of, an amino acid sequence selected from the group: MCNLPIKVVCRANAEYMSPSGKVPXXHVGNQVVS]ELGPIVQFVKAKGHSLS DGLEEVQKAEMKAYMELVNNMLLTAELYLQWCDEATVGXITHXRYGSPYP WPLXHILAYQKQWEVKRKXKAIGWGKKTLDQVLEDVDQCCQALSQRLGTQ PYFFNKQPTELDALVFGHLYTILTTQLTNDELSEKVKNYSNLLAFCRRIEQHY FED RGKGRLS (SEQ ID NO:965), MCNLPIKVVCRANAEYMSPSGKVPXXHVGNQVVSELGPIVQFVK (SEQ ID NO:966), FVKAKGHSLSDGLEEVQKAEMKAYMELVNNMLLTAELYLQWCDE (SEQ ID NO:967), LQWCDEATVGXITHXRYGSPYPWP LXHILAYQKQWEVKRKXKAIGWGKKTL (SEQ ID NO:968), DQVLEDVDQCCQ ALSQRLGTQPYFFNKQPTELDALVFGHLYTI (SEQ ID NO:969), and/or LTTQLTNDELSEKVKNYSNLLAFCRRIEQHYFEDRGKGRLS (SEQ ID NO:970). Moreover, fragments and variants of these polypeptides (such as, for example, fragments as described herein, polypeptides at least 80%, 85%, 90%, 95%, 96%, 97%, 98%, or 99% identical to these polypeptides and polypeptides encoded by the polynucleotide which hybridizes, under stringent conditions, to the polynucleotide encoding these polypeptides) are encompassed by the invention. Antibodies that bind polypeptides of the invention are also encompassed by the invention. Polynucleotides encoding these polypeptides are also encompassed by the invention. (See Genbank Accession No. gi|1326108).

[0925] The gene encoding the disclosed cDNA is thought to reside on chromosome 2. Accordingly, polynucleotides related to this invention are useful as a marker in linkage analysis for chromosome 2.

[0926] This gene is expressed primarily in fetal tissues, and to a lesser extent in hematopoietic cells and tissues, including spleen, monocytes, and T cells.

[0927] Polynucleotides and polypeptides of the invention are useful as reagents for differential identification of the tissue(s) or cell type(s) present in a biological sample and for diagnosis of diseases and conditions which include, but are not limited to, cancer; lymphoproliferative disorders; inflammation; chondrosarcoma, and Gaucher disease. Similarly, polypeptides and antibodies directed to these polypeptides are useful in providing immunological probes for differential identification of the tissue(s) or cell type(s). For a number of disorders of the above tissues or cells, particularly of the hematopoietic and embryonic systems, expression of this gene at significantly higher or lower levels may be routinely detected in certain tissues or cell types (e.g. immune, fetal, cancerous and wounded tissues) or bodily fluids (e.g., lymph, serum, plasma, urine, synovial fluid and spinal fluid) or another tissue or cell sample taken from an individual having such a disorder, relative to the standard gene expression level, i.e., the expression level in healthy tissue or bodily fluid from an individual not having the disorder.

[0928] The tissue distribution in fetal tissues indicates that the protein product of this gene is useful for the diagnosis and treatment of cancer and other proliferative disorders. Moreover, this protein may play a role in the regulation of cellular division. Additionally, the expression in hematopoietic cells and tissues indicates that this protein may play a role in the proliferation, differentiation, and survival of hematopoietic cell lineages. Thus, this gene may be useful in the treatment of lymphoproliferative disorders, and in the maintenance and differentiation of various hematopoietic lineages from early hematopoietic stem and committed progenitor cells. Protein, as well as, antibodies directed against the protein may show utility as a tumor marker and/or immunotherapy targets for the above listed tissues.

[0929] Many polynucleotide sequences, such as EST sequences, are publicly available and accessible through sequence databases. Some of these sequences are related to SEQ ID NO:127 and may have been publicly available prior to conception of the present invention. Preferably, such related polynucleotides are specifically excluded from the scope of the present invention. To list every related sequence is cumbersome. Accordingly, preferably excluded from the present invention are one or more polynucleotides comprising a nucleotide sequence described by the general formula of a-b, where a is any integer between 1 to 1059 of SEQ ID NO:127, b is an integer of 15 to 1073, where both a and b correspond to the positions of nucleotide residues shown in SEQ ID NO:127, and where b is greater than or equal to a+14.

[0930] Features of Protein Encoded by Gene No: 118

[0931] The translation product of this gene shares sequence homology with reverse transcriptase, which is important in the synthesis of a cDNA chain from an RNA molecule, and is a method whereby the infecting RNA chains of retroviruses are transcribed into their DNA complements. In specific embodiments, polypeptides of the invention comprise, or alternatively consists of, an amino acid sequence selected from the group: MXXXNSHITIFTLNVNGLNAPNERHRLANWIQSQDQVCCIQETHLTGRDTHR LKIKGWRKIYQANGKQKK (SEQ ID NO:971), FTLNVNGLNAPNERHRLANWIQSQDQVC (SEQ ID NO:972), THLTGRDTHRLKIKGWR (SEQ ID NO:973), and/or GWRKIYQANGKQKK (SEQ ID NO:974). Moreover, fragments and variants of these polypeptides (such as, for example, fragments as described herein, polypeptides at least 80%, 85%, 90%, 95%, 96%, 97%, 98%, or 99% identical to these polypeptides and polypeptides encoded by the polynucleotide which hybridizes, under stringent conditions, to the polynucleotide encoding these polypeptides) are encompassed by the invention. Antibodies that bind polypeptides of the invention are also encompassed by the invention. Polynucleotides encoding these polypeptides are also encompassed by the invention. (See Genbank Accession No. gi|2072964).

[0932] This gene is expressed primarily in skin, and to a lesser extent in neutrophils.

[0933] Polynucleotides and polypeptides of the invention are useful as reagents for differential identification of the tissue(s) or cell type(s) present in a biological sample and for diagnosis of diseases and conditions which include, but are not limited to, cancers; hematopoietic disorders; inflammation; disorders of immune surveillance. Similarly, polypeptides and antibodies directed to these polypeptides are useful in providing immunological probes for differential identification of the tissue(s) or cell type(s). For a number of disorders of the above tissues or cells, particularly of the epidermis and/or hematopoietic system, expression of this gene at significantly higher or lower levels may be routinely detected in certain tissues or cell types (e.g. skin, immune, cancerous and wounded tissues) or bodily fluids (e.g., lymph, serum, plasma, urine, synovial fluid and spinal fluid) or another tissue or cell sample taken from an individual having such a disorder, relative to the standard gene expression level, i.e., the expression level in healthy tissue or bodily fluid from an individual not having the disorder.

[0934] The tissue distribution in skin, combined with the homology to a reverse transcriptase indicates that the protein product of this gene is useful for cancer therapy, particularly of the integumentary system. Expression in the skin also indicates that this gene is useful in wound healing and fibrosis. Expression by neutrophils also indicates that this gene product plays a role in inflammation and the control of immune surveillance (i.e., recognition of viral pathogens). Reverse transcriptase family members are also useful in the detection and treatment of AIDS. Protein, as well as, antibodies directed against the protein may show utility as a tumor marker and/or immunotherapy targets for the above listed tissues.

[0935] Many polynucleotide sequences, such as EST sequences, are publicly available and accessible through sequence databases. Some of these sequences are related to SEQ ID NO:128 and may have been publicly available prior to conception of the present invention. Preferably, such related polynucleotides are specifically excluded from the scope of the present invention. To list every related sequence is cumbersome. Accordingly, preferably excluded from the present invention are one or more polynucleotides comprising a nucleotide sequence described by the general formula of a-b, where a is any integer between 1 to 286 of SEQ ID NO:128, b is an integer of 15 to 300, where both a and b correspond to the positions of nucleotide residues shown in SEQ ID NO:128, and where b is greater than or equal to a+14.

[0936] Features of Protein Encoded by Gene No: 119

[0937] The translation product of this gene shares sequence homology with reverse transcriptase, which is important in the synthesis of a cDNA copy of an RNA molecule, and is a method whereby a retrovirus reverse-transcribes its genome into an inheritable DNA copy.

[0938] This gene is expressed primarily in the frontal cortex of brain.

[0939] Polynucleotides and polypeptides of the invention are useful as reagents for differential identification of the tissue(s) or cell type(s) present in a biological sample and for diagnosis of diseases and conditions which include, but are not limited to, cancer and neurodegenerative disorders. Similarly, polypeptides and antibodies directed to these polypeptides are useful in providing immunological probes for differential identification of the tissue(s) or cell type(s). For a number of disorders of the above tissues or cells, particularly of the CNS and peripheral nervous system, expression of this gene at significantly higher or lower levels may be routinely detected in certain tissues or cell types (e.g. brain, cancerous and wounded tissues) or bodily fluids (e.g., lymph, serum, plasma, urine, synovial fluid and spinal fluid) or another tissue or cell sample taken from an individual having such a disorder, relative to the standard gene expression level, i.e., the expression level in healthy tissue or bodily fluid from an individual not having the disorder.

[0940] The tissue distribution in the frontal cortex, combined with the homology to a reverse transcriptase suggest that this gene is useful in the treatment of cancer and AIDS, particularly of the neural system. The expression in brain indicates that it plays a role in neurodegenerative disorders and in neural degeneration. Furthermore, elevated expression of this gene product within the frontal cortex of the brain indicates that it may be involved in neuronal survival; synapse formation; conductance; neural differentiation, etc. Such involvement may impact many processes, such as learning and cognition. It may also be useful in the treatment of such neurodegenerative disorders as schizophrenia; ALS; or Alzheimer's. Protein, as well as, antibodies directed against the protein may show utility as a tissue-specific marker and/or immunotherapy target for the above listed tissues.

[0941] Many polynucleotide sequences, such as EST sequences, are publicly available and accessible through sequence databases. Some of these sequences are related to SEQ ID NO:129 and may have been publicly available prior to conception of the present invention. Preferably, such related polynucleotides are specifically excluded from the scope of the present invention. To list every related sequence is cumbersome. Accordingly, preferably excluded from the present invention are one or more polynucleotides comprising a nucleotide sequence described by the general formula of a-b, where a is any integer between 1 to 1261 of SEQ ID NO:129, b is an integer of 15 to 1275, where both a and b correspond to the positions of nucleotide residues shown in SEQ ID NO:129, and where b is greater than or equal to a+14.

[0942] Features of Protein Encoded by Gene No: 120

[0943] The translation product of this gene shares homology to a hypothetical protein in Schizosaccharomyces pombe (See Genbank Accession No. 2281980).

[0944] In specific embodiments, polypeptides of the invention comprise, or alternatively consists of, an amino acid sequence selected from the group: IYHLHSWIFFHFKRAFCMCFITMKVIHAHCSKLRKCXNAQIS VFCTTLTASYPT (SEQ ID NO:975), IYHLHSWIFFHFKRAFCMCFITM (SEQ ID NO:976), and/or KVIHAHCSKLRKCXNAQISVFCTTLTASYPT (SEQ ID NO:977). Moreover, fragments and variants of these polypeptides (such as, for example, fragments as described herein, polypeptides at least 80%, 85%, 90%, 95%, 96%, 97%, 98%, or 99% identical to these polypeptides and polypeptides encoded by the polynucleotide which hybridizes, under stringent conditions, to the polynucleotide encoding these polypeptides) are encompassed by the invention. Antibodies that bind polypeptides of the invention are also encompassed by the invention. Polynucleotides encoding these polypeptides are also encompassed by the invention.

[0945] The gene encoding the disclosed cDNA is thought to reside on chromosome 18. Accordingly, polynucleotides related to this invention are useful as a marker in linkage analysis for chromosome 18.

[0946] This gene is expressed primarily in adult hypothalamus and to a lesser extent in infant brain.

[0947] Polynucleotides and polypeptides of the invention are useful as reagents for differential identification of the tissue(s) or cell type(s) present in a biological sample and for diagnosis of diseases and conditions which include, but are not limited to, neurodegenerative disorders; endocrine function; and vertigo. Similarly, polypeptides and antibodies directed to these polypeptides are useful in providing immunological probes for differential identification of the tissue(s) or cell type(s). For a number of disorders of the above tissues or cells, particularly of the brain, CNS and peripheral nervous system, expression of this gene at significantly higher or lower levels may be routinely detected in certain tissues or cell types (e.g. brain, cancerous and wounded tissues) or bodily fluids (e.g., lymph, serum, plasma, urine, synovial fluid and spinal fluid) or another tissue or cell sample taken from an individual having such a disorder, relative to the standard gene expression level, i.e., the expression level in healthy tissue or bodily fluid from an individual not having the disorder.

[0948] The tissue distribution in adult hypothalamus and infant brain indicates that the protein product of this gene is useful for the treatment and diagnosis of neurodegenerative disorders; diagnosis of tumors of a brain or neuronal origin; treatments involving hormonal control of the entire body and of homeostasis, behavioral disorders, such as Alzheimer's Disease, Parkinson's Disease, Huntington's Disease, schizophrenia, mania, dementia, paranoia, obsessive compulsive disorder and panic disorder. In addition, the gene or gene product may also play a role in the treatment and/or detection of developmental disorders associated with the developing embryo. Protein, as well as, antibodies directed against the protein may show utility as a tissue-specific marker and/or immunotherapy target for the above listed tissues.

[0949] Many polynucleotide sequences, such as EST sequences, are publicly available and accessible through sequence databases. Some of these sequences are related to SEQ ID NO:130 and may have been publicly available prior to conception of the present invention. Preferably, such related polynucleotides are specifically excluded from the scope of the present invention. To list every related sequence is cumbersome. Accordingly, preferably excluded from the present invention are one or more polynucleotides comprising a nucleotide sequence described by the general formula of a-b, where a is any integer between 1 to 458 of SEQ ID NO:130, b is an integer of 15 to 472, where both a and b correspond to the positions of nucleotide residues shown in SEQ ID NO:130, and where b is greater than or equal to a+14.

[0950] Features of Protein Encoded by Gene No: 121

[0951] The translation product of this gene shares sequence homology with the human IRLB protein which is thought to be important in binding to a c-myc promoter element and thus regulating its transcription (See Genbanlk Accession No. gi|33969). The gene encoding the disclosed cDNA is thought to reside on chromosome 1. Accordingly, polynucleotides related to this invention are useful as a marker in linkage analysis for chromosome 1.

[0952] In specific embodiments, polypeptides of the invention comprise, or alternatively consists of, an amino acid sequence selected from the group: WNLLWYFQRLRLPSILPGLVLASCDGPSXSQAPSPWLTPDPASVQVRLLWDV LTPDPN (SEQ ID NO:978), QRGIYREILFLTMAALGKDHVDIVAFDKKYKSAF NKLASSMGKEELRHRRAQMP (SEQ ID NO:979), and/or WNLLWYFQRLRLP SILPGLVLAS (SEQ ID NO:980). Moreover, fragments and variants of these polypeptides (such as, for example, fragments as described herein, polypeptides at least 80%, 85%, 90%, 95%, 96%, 97%, 98%, or 99% identical to these polypeptides and polypeptides encoded by the polynucleotide which hybridizes, under stringent conditions, to the polynucleotide encoding these polypeptides) are encompassed by the invention. Antibodies that bind polypeptides of the invention are also encompassed by the invention. Polynucleotides encoding these polypeptides are also encompassed by the invention.

[0953] This gene is expressed primarily in brain and breast, and to a lesser extent in a variety of hematopoietic tissues and cells.

[0954] Polynucleotides and polypeptides of the invention are useful as reagents for differential identification of the tissue(s) or cell type(s) present in a biological sample and for diagnosis of diseases and conditions which include, but are not limited to, cancer of the brain and breast; lymphoproliferative disorders; neurodegenerative diseases. Similarly, polypeptides and antibodies directed to these polypeptides are useful in providing immunological probes for differential identification of the tissue(s) or cell type(s). For a number of disorders of the above tissues or cells, particularly of the CNS, breast, and immune system, expression of this gene at significantly higher or lower levels may be routinely detected in certain tissues or cell types (e.g. brain, breast, immune, cancerous and wounded tissues) or bodily fluids (e.g., lymph, serum, plasma, urine, synovial fluid and spinal fluid) or another tissue or cell sample taken from an individual having such a disorder, relative to the standard gene expression level, i.e., the expression level in healthy tissue or bodily fluid from an individual not having the disorder.

[0955] The tissue distribution in brain indicates that the protein product of this gene is useful for the treatment and diagnosis of cancer of the brain, breast, and hematopoietic system. In addition, it is useful for the treatment of neurodegenerative disorders, as well as disorders of the hematopoietic system, including defects in immune competency and inflammation. Protein, as well as, antibodies directed against the protein may show utility as a tumor marker and immunotherapy targets for the above listed tumors and tissues.

[0956] Many polynucleotide sequences, such as EST sequences, are publicly available and accessible through sequence databases. Some of these sequences are related to SEQ ID NO:131 and may have been publicly available prior to conception of the present invention. Preferably, such related polynucleotides are specifically excluded from the scope of the present invention. To list every related sequence is cumbersome. Accordingly, preferably excluded from the present invention are one or more polynucleotides comprising a nucleotide sequence described by the general formula of a-b, where a is any integer between 1 to 1936 of SEQ ID NO:131, b is an integer of 15 to 1950, where both a and b correspond to the positions of nucleotide residues shown in SEQ ID NO:131, and where b is greater than or equal to a+14.

[0957] Features of Protein Encoded by Gene No: 122

[0958] The translation product of this gene shares sequence homology with an ATP synthase, a key component of the proton channel that is thought to be important in the translocation of protons across the membrane.

[0959] This gene is expressed primarily in T-cell lymphoma.

[0960] Polynucleotides and polypeptides of the invention are useful as reagents for differential identification of the tissue(s) or cell type(s) present in a biological sample and for diagnosis of diseases and conditions which include, but are not limited to, T cell lymphoma. Similarly, polypeptides and antibodies directed to these polypeptides are useful in providing immunological probes for differential identification of the tissue(s) or cell type(s). For a number of disorders of the above tissues or cells, particularly of the immune system, expression of this gene at significantly higher or lower levels may be routinely detected in certain tissues or cell types (e.g. immune, cancerous and wounded tissues) or bodily fluids (e.g., lymph, serum, plasma, urine, synovial fluid and spinal fluid) or another tissue or cell sample taken from an individual having such a disorder, relative to the standard gene expression level, i.e., the expression level in healthy tissue or bodily fluid from an individual not having the disorder.

[0961] The tissue distribution in T-cell lymphoma, combined with the homology to an ATP synthase indicates that the protein product of this gene is useful for the treatment of defects in proton transport, homeostasis, and metabolism, as well as the diagnosis and treatment of lymphoma. Because the gene is expressed in cells of lymphoid origin, the natural gene product may be involved in immune functions. Therefore it may be also used as an agent for immunological disorders including arthritis, asthma, immune deficiency diseases such as AIDS, and leukemia. Protein, as well as, antibodies directed against the protein may show utility as a tumor marker and/or immunotherapy targets for the above listed tissues.

[0962] Many polynucleotide sequences, such as EST sequences, are publicly available and accessible through sequence databases. Some of these sequences are related to SEQ ID NO:132 and may have been publicly available prior to conception of the present invention. Preferably, such related polynucleotides are specifically excluded from the scope of the present invention. To list every related sequence is cumbersome. Accordingly, preferably excluded from the present invention are one or more polynucleotides comprising a nucleotide sequence described by the general formula of a-b, where a is any integer between 1 to 976 of SEQ ID NO:132, b is an integer of 15 to 990, where both a and b correspond to the positions of nucleotide residues shown in SEQ ID NO:132, and where b is greater than or equal to a+14.

[0963] Features of Protein Encoded by Gene No: 123

[0964] The gene encoding the disclosed cDNA is thought to reside on chromosome 15. Accordingly, polynucleotides related to this invention are useful as a marker in linkage analysis for chromosome 15.

[0965] This gene is expressed primarily in a variety of fetal tissues, including fetal liver, lung, and spleen, and to a lesser extent in a variety of blood cells, including eosinophils and T cells.

[0966] Polynucleotides and polypeptides of the invention are useful as reagents for differential identification of the tissue(s) or cell type(s) present in a biological sample and for diagnosis of diseases and conditions which include, but are not limited to, cancer (abnormal cell proliferation); T cell lymphomas; and hematopoietic disorders. Similarly, polypeptides and antibodies directed to these polypeptides are useful in providing immunological probes for differential identification of the tissue(s) or cell type(s). For a number of disorders of the above tissues or cells, particularly of the fetus and immune system, expression of this gene at significantly higher or lower levels may be routinely detected in certain tissues or cell types (e.g. fetal, immune, cancerous and wounded tissues) or bodily fluids (e.g., lymph, serum, plasma, urine, synovial fluid and spinal fluid) or another tissue or cell sample taken from an individual having such a disorder, relative to the standard gene expression level, i.e., the expression level in healthy tissue or bodily fluid from an individual not having the disorder.

[0967] The tissue distribution in fetal tissues indicates that the protein product of this gene is useful for the treatment and diagnosis of conditions involving cell proliferation. Similarly, the fetal tissue expression, as well as the expression in a variety of blood cell lineages, indicates that it may play a role in either cellular proliferation, apoptosis, or cell survival. Thus it may be useful in the management and treatment of a variety of cancers and malignancies. In addition, its expression in blood cells indicates that it may play additional roles in hematopoietic disorders and conditions, and could be useful in treating diseases involving autoimmunity, immune modulation, immune surveillance, and inflammation. Protein, as well as, antibodies directed against the protein may show utility as a tumor marker and/or immunotherapy targets for the above listed tissues.

[0968] Many polynucleotide sequences, such as EST sequences, are publicly available and accessible through sequence databases. Some of these sequences are related to SEQ ID NO:133 and may have been publicly available prior to conception of the present invention. Preferably, such related polynucleotides are specifically excluded from the scope of the present invention. To list every related sequence is cumbersome. Accordingly, preferably excluded from the present invention are one or more polynucleotides comprising a nucleotide sequence described by the general formula of a-b, where a is any integer between 1 to 1706 of SEQ ID NO:133, b is an integer of 15 to 1720, where both a and b correspond to the positions of nucleotide residues shown in SEQ ID NO:133, and where b is greater than or equal to a+14.

[0969] Features of Protein Encoded by Gene No: 124

[0970] This gene is expressed primarily in placenta, and to a lesser extent in pineal gland and rhabdomyosarcoma.

[0971] Polynucleotides and polypeptides of the invention are useful as reagents for differential identification of the tissue(s) or cell type(s) present in a biological sample and for diagnosis of diseases and conditions which include, but are not limited to, developmental, endocrine, and female reproductive disorders. Similarly, polypeptides and antibodies directed to these polypeptides are useful in providing immunological probes for differential identification of the tissue(s) or cell type(s). For a number of disorders of the above tissues or cells, particularly of the placenta and endocrine system, expression of this gene at significantly higher or lower levels may be routinely detected in certain tissues or cell types (e.g. placental, endocrine, cancerous and wounded tissues) or bodily fluids (e.g., lymph, serum, plasma, urine, synovial fluid and spinal fluid) or another tissue or cell sample taken from an individual having such a disorder, relative to the standard gene expression level, i.e., the expression level in healthy tissue or bodily fluid from an individual not having the disorder.

[0972] Predicted epitopes include those comprising a sequence shown in SEQ ID NO:372 as residues: Leu-69 to Val-76.

[0973] The tissue distribution in placenta indicates that the protein product of this gene is useful for the diagnosis and treatment of developmental disorders. Furthermore, the tissue distribution indicates that the protein product of this gene is useful for the diagnosis and/or treatment of disorders of the placenta. Specific expression within the placenta indicates that this gene product may play a role in the proper establishment and maintenance of placental function. Alternately, this gene product may be produced by the placenta and then transported to the embryo, where it may play a crucial role in the development and/or survival of the developing embryo or fetus. Expression of this gene product in a vascular-rich tissue such as the placenta also indicates that this gene product may be produced more generally in endothelial cells or within the circulation. In such instances, it may play more generalized roles in vascular function, such as in angiogenesis. It may also be produced in the vasculature and have effects on other cells within the circulation, such as hematopoietic cells. It may serve to promote the proliferation, survival, activation, and/or differentiation of hematopoietic cells, as well as other cells throughout the body. Protein, as well as, antibodies directed against the protein may show utility as a tissue-specific marker and/or immunotherapy target for the above listed tissues.

[0974] Many polynucleotide sequences, such as EST sequences, are publicly available and accessible through sequence databases. Some of these sequences are related to SEQ ID NO:134 and may have been publicly available prior to conception of the present invention. Preferably, such related polynucleotides are specifically excluded from the scope of the present invention. To list every related sequence is cumbersome. Accordingly, preferably excluded from the present invention are one or more polynucleotides comprising a nucleotide sequence described by the general formula of a-b, where a is any integer between 1 to 691 of SEQ ID NO:134, b is an integer of 15 to 705, where both a and b correspond to the positions of nucleotide residues shown in SEQ ID NO:134, and where b is greater than or equal to a+14.

[0975] Features of Protein Encoded by Gene No: 125

[0976] Contact of cells with supernatant expressing the product of this gene increases the permeability of THP-1 Monocyte cells to calcium. Thus, it is likely that the product of this gene is involved in a signal transduction pathway that is initiated when the product of this gene binds a receptor on the surface of the Monocyte cell. Thus, polynucleotides and polypeptides have uses which include, but are not limited to, activating monocyte cells.

[0977] This gene is expressed primarily in benign prostatic hyperplasia.

[0978] Polynucleotides and polypeptides of the invention are useful as reagents for differential identification of the tissue(s) or cell type(s) present in a biological sample and for diagnosis of benign prostatic hyperplasia. Similarly, polypeptides and antibodies directed to these polypeptides are useful in providing immunological probes for differential identification of the tissue(s) or cell type(s). For a number of disorders of the above tissues or cells, particularly of the reproductive system, expression of this gene at significantly higher or lower levels may be routinely detected in certain tissues or cell types (e.g. reproductive, cancerous and wounded tissues) or bodily fluids (e.g., lymph, serum, plasma, urine, synovial fluid and spinal fluid) or another tissue or cell sample taken from an individual having such a disorder, relative to the standard gene expression level, i.e., the expression level in healthy tissue or bodily fluid from an individual not having the disorder.

[0979] The tissue distribution in benign prostatic hyperplasia tissue indicates that the protein product of this gene is useful for the treatment and diagnosis of proliferative disorders of the prostate. Furthermore, the biological activity data indicates that the translation product of this gene is useful for the stimulation of certain immune system cells, such as monocytes, which may be useful for helping the body to defend against infection. Protein, as well as, antibodies directed against the protein may show utility as a tumor marker and immunotherapy targets for the above listed tumors and tissues.

[0980] Many polynucleotide sequences, such as EST sequences, are publicly available and accessible through sequence databases. Some of these sequences are related to SEQ ID NO:135 and may have been publicly available prior to conception of the present invention. Preferably, such related polynucleotides are specifically excluded from the scope of the present invention. To list every related sequence is cumbersome. Accordingly, preferably excluded from the present invention are one or more polynucleotides comprising a nucleotide sequence described by the general formula of a-b, where a is any integer between 1 to 309 of SEQ ID NO:135, b is an integer of 15 to 323, where both a and b correspond to the positions of nucleotide residues shown in SEQ ID NO:135, and where b is greater than or equal to a+14.

[0981] Features of Protein Encoded by Gene No: 126

[0982] This gene is expressed primarily in Raji cells.

[0983] Polynucleotides and polypeptides of the invention are useful as reagents for differential identification of the tissue(s) or cell type(s) present in a biological sample and for diagnosis of diseases and conditions which include, but are not limited to, inflammation and T cell autoimmune disorders. Similarly, polypeptides and antibodies directed to these polypeptides are useful in providing immunological probes for differential identification of the tissue(s) or cell type(s). For a number of disorders of the above tissues or cells, particularly of the immune system, expression of this gene at significantly higher or lower levels may be routinely detected in certain tissues or cell types (e.g., cancerous and wounded tissues) or bodily fluids (e.g., lymph, serum, plasma, urine, synovial fluid and spinal fluid) or another tissue or cell sample taken from an individual having such a disorder, relative to the standard gene expression level, i.e., the expression level in healthy tissue or bodily fluid from an individual not having the disorder.

[0984] The tissue distribution in Raji cells indicates that the protein product of this gene is useful for treatment and diagnosis of inflammation and T cell autoimmune disorders. Because the gene is expressed in cells of lymphoid origin, the natural gene product may be involved in immune functions. Therefore it may be also used as an agent for immunological disorders including arthritis, asthma, immune deficiency diseases (such as AIDS), and leukemia. Protein, as well as, antibodies directed against the protein may show utility as a tumor marker and/or immunotherapy targets for the above listed tissues.

[0985] Many polynucleotide sequences, such as EST sequences, are publicly available and accessible through sequence databases. Some of these sequences are related to SEQ ID NO:136 and may have been publicly available prior to conception of the present invention. Preferably, such related polynucleotides are specifically excluded from the scope of the present invention. To list every related sequence is cumbersome. Accordingly, preferably excluded from the present invention are one or more polynucleotides comprising a nucleotide sequence described by the general formula of a-b, where a is any integer between 1 to 568 of SEQ ID NO:136, b is an integer of 15 to 582, where both a and b correspond to the positions of nucleotide residues shown in SEQ ID NO:136, and where b is greater than or equal to a+14.

[0986] Features of Protein Encoded by Gene No: 127

[0987] This gene is expressed primarily in apoptotic T-cells, and to a lesser extent in suppressor T cells and ulcerative colitis.

[0988] Polynucleotides and polypeptides of the invention are useful as reagents for differential identification of the tissue(s) or cell type(s) present in a biological sample and for diagnosis of diseases and conditions which include, but are not limited to, diseases involving premature apoptosis, and immunological and gastrointestinal disorders. Similarly, polypeptides and antibodies directed to these polypeptides are useful in providing immunological probes for differential identification of the tissue(s) or cell type(s). For a number of disorders of the above tissues or cells, particularly of the immune system, expression of this gene at significantly higher or lower levels may be routinely detected in certain tissues or cell types (e.g. immune, gastrointestinal, cancerous and wounded tissues) or bodily fluids (e.g., lymph, serum, plasma, urine, synovial fluid and spinal fluid) or another tissue or cell sample taken from an individual having such a disorder, relative to the standard gene expression level, i.e., the expression level in healthy tissue or bodily fluid from an individual not having the disorder.

[0989] Predicted epitopes include those comprising a sequence shown in SEQ ID NO:375 as residues: Asp-23 to Gly-29.

[0990] The tissue distribution in apoptotic T-cells indicates that the protein product of this gene is useful for the treatment and diagnosis of disorders involving inappropriate levels of apoptosis, especially in immune cell lineages. Because the gene is expressed in cells of lymphoid origin, the natural gene product may be involved in immune functions. Therefore it may be also used as an agent for immunological disorders including arthritis, asthma, immune deficiency diseases (such as AIDS), and leukemia. Furthermore, expression of this gene product in T cells also strongly indicates a role for this protein in immune function and immune surveillance. Protein, as well as, antibodies directed against the protein may show utility as a tumor marker and/or immunotherapy targets for the above listed tissues.

[0991] Many polynucleotide sequences, such as EST sequences, are publicly available and accessible through sequence databases. Some of these sequences are related to SEQ ID NO:137 and may have been publicly available prior to conception of the present invention. Preferably, such related polynucleotides are specifically excluded from the scope of the present invention. To list every related sequence is cumbersome. Accordingly, preferably excluded from the present invention are one or more polynucleotides comprising a nucleotide sequence described by the general formula of a-b, where a is any integer between 1 to 1007 of SEQ ID NO:137, b is an integer of 15 to 1021, where both a and b correspond to the positions of nucleotide residues shown in SEQ ID NO:137, and where b is greater than or equal to a+14.

[0992] Features of Protein Encoded by Gene No: 128

[0993] The translation product of this gene shares sequence homology with an C. elegans coding region C47D12.2 of unknown function (See Genbank Accession No. gn1|PID|e348986).

[0994] In specific embodiments, polypeptides of the invention comprise, or alternatively consists of, an amino acid sequence selected from the group: EDDGFNRSIHEVILKNITWYSERVLTEISLGSLLILVVIRTIQYNMTRTRDKYLH TNCLAALANMSAQFRSLHQYAAQRIISLFSLLSKKHNKVLEQATQSLRGSLSS NDVPLPDYAQDLNVIEEVIRMMLEIINSCLTNSLHHTPNLVYALLYKRDLFEQ FRTHPSFQDIMQNIDLVISFFSSRLLQAGS (SEQ ID NO:981), EDDGFNRSIHEVILKNITWYSERVLTEISLGSLLILVV (SEQ ID NO:982), RTIQYNMTRTRDKYLHTNCLAALANMSAQFRSLHQYAAQRIISLFSLLSKKH N (SEQ ID NO:983), SCLTNSLHHNPNLVYALLYKRDLFEQFRTHPSFQDIMQNIDLVISFFSSRLLQA GS (SEQ ID NO:984), KKHNKVLEQATQSLRGSLSSNDVPLPDYAQD (SEQ ID NO:985), TISNSSFISGYNAKY (SEQ ID NO:986), and/or LKVAASWELSCQWNGSWKSLSKASLRC PKTD (SEQ ID NO:987). Moreover, fragments and variants of these polypeptides (such as, for example, fragments as described herein, polypeptides at least 80%, 85%, 90%, 95%, 96%, 97%, 98%, or 99% identical to these polypeptides and polypeptides encoded by the polynucleotide which hybridizes, under stringent conditions, to the polynucleotide encoding these polypeptides) are encompassed by the invention. Antibodies that bind polypeptides of the invention are also encompassed by the invention. Polynucleotides encoding these polypeptides are also encompassed by the invention.

[0995] The gene encoding the disclosed cDNA is thought to reside on chromosome 18. Accordingly, polynucleotides related to this invention are useful as a marker in linkage analysis for chromosome 18.

[0996] This gene is expressed primarily in smooth muscle, and to a lesser extent in fetal liver/spleen.

[0997] Polynucleotides and polypeptides of the invention are useful as reagents for differential identification of the tissue(s) or cell type(s) present in a biological sample and for diagnosis of diseases and conditions which include, but are not limited to, atherosclerosis and other cardiovascular and hepatic disorders. Similarly, polypeptides and antibodies directed to these polypeptides are useful in providing immunological probes for differential identification of the tissue(s) or cell type(s). For a number of disorders of the above tissues or cells, particularly of the circulatory system, expression of this gene at significantly higher or lower levels may be routinely detected in certain tissues or cell types (e.g. muscle, fetal liver/spleen, cancerous and wounded tissues) or bodily fluids (e.g., lymph, serum, plasma, urine, synovial fluid and spinal fluid) or another tissue or cell sample taken from an individual having such a disorder, relative to the standard gene expression level, i.e., the expression level in healthy tissue or bodily fluid from an individual not having the disorder.

[0998] The tissue distribution in smooth muscle indicates that the protein product of this gene is useful for the diagnosis and treatment of circulatory system disorders such as atherosclerosis, hypertension, stroke, aneurysms, embolisms, and thrombosis. In addition, the tissue distribution indicates that the protein product of this gene is useful for the detection and treatment of liver disorders and cancers (e.g. hepatoblastoma, jaundice, hepatitis, liver metabolic diseases and conditions that are attributable to the differentiation of hepatocyte progenitor cells). In addition the expression in fetus indicates a useful role for the protein product in developmental abnormalities, fetal deficiencies, pre-natal disorders and various would-healing models and/or tissue trauma. Protein, as well as, antibodies directed against the protein may show utility as a tumor marker and/or immunotherapy targets for the above listed tissues.

[0999] Many polynucleotide sequences, such as EST sequences, are publicly available and accessible through sequence databases. Some of these sequences are related to SEQ ID NO:138 and may have been publicly available prior to conception of the present invention. Preferably, such related polynucleotides are specifically excluded from the scope of the present invention. To list every related sequence is cumbersome. Accordingly, preferably excluded from the present invention are one or more polynucleotides comprising a nucleotide sequence described by the general formula of a-b, where a is any integer between 1 to 1763 of SEQ ID NO:138, b is an integer of 15 to 1777, where both a and b correspond to the positions of nucleotide residues shown in SEQ ID NO:138, and where b is greater than or equal to a+14.

[1000] Features of Protein Encoded by Gene No: 129

[1001] The translation product of this gene shares sequence homology with a ribosomal protein which is thought to be important in cellular metabolism, in addition to the C.elegans protein F40F11.1 which does not have a known function at the current time (See Genbank Accession No. gn1|PID|e244552).

[1002] In specific embodiments, polypeptides of the invention comprise, or alternatively consists of, an amino acid sequence selected from the group: MADIQTERAYQKQPTIFQNKKRVLLGETGKEKLPRVTNKNIGLGFKDTPRRL LRGTYIDKKCPFTGNVSIRGRILSGVVTQDEDAEDHCHPPRLSALHPQVQPLR EAPQEHVCTPVPLLQGRPDR (SEQ ID NO:988), MKMQRTVIRRDYLHYIRKYNRFEKRHKNMSVHLSPCFRDVQIGDIVTVGEC RPLSKTVRFNVLKVTKAAGTKKQFQKF (SEQ ID NO:989), MADIQTERAYQKQPTIFQNKKRVLLGETGK (SEQ ID NO:990), KLPRVTNKNIGLGFKDTPRRLLRGTYIDKKCPFTGNVSIRGRILSGVVTQDED AEDHC (SEQ ID NO:991), HCHPPRLSALHPQVQPLREAPQEHVCTPVPLLQGRPDR (SEQ ID NO:992), MKMQRTIVIRRDYLHYIRKYNRFEKRHKNMSVHLSP (SEQ ID NO:993), CFRDVQIGDIVTVGECRPLSKTVRFNVLKVTKAAGTKKQFQKF (SEQ ID NO:994), PRRLLRGTYIDKKCPFTGNVSIRGRILSGVVTQ (SEQ ID NO:995), SRGTGVQTCSCGASRSGCTCGCSADSLGG (SEQ ID NO:996), and/or QWSSASSSWVTTPERIRPRMDTLPVKGHFLSM (SEQ ID NO:997). Moreover, fragments and variants of these polypeptides (such as, for example, fragments as described herein, polypeptides at least 80%, 85%, 90%, 95%, 96%, 97%, 98%, or 99% identical to these polypeptides and polypeptides encoded by-the polynucleotide which hybridizes, under stringent conditions, to the polynucleotide encoding these polypeptides) are encompassed by the invention. Antibodies that bind polypeptides of the invention are also encompassed by the invention. Polynucleotides encoding these polypeptides are also encompassed by the invention.

[1003] The gene encoding the disclosed cDNA is thought to reside on chromosome 19. Accordingly, polynucleotides related to this invention are useful as a marker in linkage analysis for chromosome 19.

[1004] This gene is expressed primarily in Wilm's tumor, and to a lesser extent in thymus and stromal cells.

[1005] Polynucleotides and polypeptides of the invention are useful as reagents for differential identification of the tissue(s) or cell type(s) present in a biological sample and for diagnosis of diseases and conditions which include, but are not limited to, Kidney disorders and cancer, diseases affecting RNA translation. Similarly, polypeptides and antibodies directed to these polypeptides are useful in providing immunological probes for differential identification of the tissue(s) or cell type(s). For a number of disorders of the above tissues or cells, particularly of the Wilm's tumors, expression of this gene at significantly higher or lower levels may be routinely detected in certain tissues or cell types (e.g. kidney, thymus, cancerous and wounded tissues) or bodily fluids (e.g., lymph, serum, plasma, urine, synovial fluid and spinal fluid) or another tissue or cell sample taken from an individual having such a disorder, relative to the standard gene expression level, i.e., the expression level in healthy tissue or bodily fluid from an individual not having the disorder.

[1006] Predicted epitopes include those comprising a sequence shown in SEQ ID NO:377 as residues: Arg-15 to Gly-22.

[1007] The tissue distribution in Wilm's tumor, combined with the homology to a ribosomal protein indicates that the protein product of this gene is useful for diseases affecting RNA translation, in addition to proliferative disorders. Furthermore, given the tissue distribution, the translation product of this gene may be useful in treating and/or detecting Wilm's tumor or tumors of other tissues mentioned previously. Protein, as well as, antibodies directed against the protein may show utility as a tumor marker and/or immunotherapy targets for the above listed tissues.

[1008] Many polynucleotide sequences, such as EST sequences, are publicly available and accessible through sequence databases. Some of these sequences are related to SEQ ID NO:139 and may have been publicly available prior to conception of the present invention. Preferably, such related polynucleotides are specifically excluded from the scope of the present invention. To list every related sequence is cumbersome. Accordingly, preferably excluded from the present invention are one or more polynucleotides comprising a nucleotide sequence described by the general formula of a-b, where a is any integer between 1 to 629 of SEQ ID NO:139, b is an integer of 15 to 643, where both a and b correspond to the positions of nucleotide residues shown in SEQ ID NO:139, and where b is greater than or equal to a+14.

[1009] Features of Protein Encoded by Gene No: 130

[1010] The translation product of this gene shares sequence homology with a yeast DNA helicase, which is thought to be important in global transcriptional regulation (See Genbank Accession No. gn1|PID|e243594). In specific embodiments, polypeptides of the invention comprise, or alternatively consists of, an amino acid sequence selected from the group: IFYDSDWNPTVDQQAMDRAHRLGQTKQVTVYRLICKGTIEERILQRAKEKSEI QRMVISG (SEQ ID NO:998), TRMIDLLEEYMVYRKHTYXRLDGSSKISERRDMVADFQNRNDIFVFLLSTRA GGLGINLTAXDTVHF (SEQ ID NO:999), IFYDSDWNPTVDQQAMDRAHRLGQTKQVTVYR (SEQ ID NO:1000), VYRLICKGTIEERILQRAKEKSEIQRMVISG (SEQ ID NO:1001), TRMIDLLEEYMVYRKHTYXRLDGSSKISERRDM (SEQ ID NO:1002), RRDMVADFQNRNDIFVFLLSTRAGGLGINLTAXDTVHF (SEQ ID NO:1003), IFYDSDWNPTVDQQAMDRAHRLGQTKQVTVYRLICKG (SEQ ID NO:1004), IFYDSDWNPTVDQQAMDRAHRLGQTKQVTVYRLICKG (SEQ ID NO:1005), RLICKGTIEERILQRAKEKSEIQRMVISG (SEQ ID NO:1006), and/or GTRMIDLLEEYMVYRKKHTYXRLDGSSKISERRDMVADFQNRNDIFVFLLSTR AGGLGINLTAXDTVHFL (SEQ ID NO:1007). Moreover, fragments and variants of these polypeptides (such as, for example, fragments as described herein, polypeptides at least 80%, 85%, 90%, 95%, 96%, 97%, 98%, or 99% identical to these polypeptides and polypeptides encoded by the polynucleotide which hybridizes, under stringent conditions, to the polynucleotide encoding these polypeptides) are encompassed by the invention. Antibodies that bind polypeptides of the invention are also encompassed by the invention. Polynucleotides encoding these polypeptides are also encompassed by the invention.

[1011] This gene is expressed primarily in amygdala.

[1012] Polynucleotides and polypeptides of the invention are useful as reagents for differential identification of the tissue(s) or cell type(s) present in a biological sample and for diagnosis of diseases and conditions which include, but are not limited to, diseases and disorders of the brain and the endocrine system. Similarly, polypeptides and antibodies directed to these polypeptides are useful in providing immunological probes for differential identification of the tissue(s) or cell type(s). For a number of disorders of the above tissues or cells, particularly of the central nervous system, endocrine system, expression of this gene at significantly higher or lower levels may be routinely detected in certain tissues or cell types (e.g. brain, endocrine, cancerous and wounded tissues) or bodily fluids (e.g., lymph, serum, plasma, urine, synovial fluid and spinal fluid) or another tissue or cell sample taken from an individual having such a disorder, relative to the standard gene expression level, i.e., the expression level in healthy tissue or bodily fluid from an individual not having the disorder.

[1013] Predicted epitopes include those comprising a sequence shown in SEQ ID NO:378 as residues: Lys-24 to Tyr-34.

[1014] The tissue distribution in amygdala, combined with the homology to a DNA helicase indicates that the protein product of this gene is useful for diseases affecting RNA transcription, particularly developmental disorders and healing wounds, since the later are thought to approximate developmental transcriptional regulation. The amygdala processes sensory information and relays this to other areas of the brain including the endocrine and autonomic domains of the hypothalamus and the brain stem. Therefore, the translation product of this gene is also useful for the detection and/or treatment of disorders of the endocrine and/or neural systems. Protein, as well as, antibodies directed against the protein may show utility as a tissue-specific marker and/or immunotherapy target for the above listed tissues.

[1015] Many polynucleotide sequences, such as EST sequences, are publicly available and accessible through sequence databases. Some of these sequences are related to SEQ ID NO:140 and may have been publicly available prior to conception of the present invention. Preferably, such related polynucleotides are specifically excluded from the scope of the present invention. To list every related sequence is cumbersome. Accordingly, preferably excluded from the present invention are one or more polynucleotides comprising a nucleotide sequence described by the general formula of a-b, where a is any integer between 1 to 1206 of SEQ ID NO:140, b is an integer of 15 to 1220, where both a and b correspond to the positions of nucleotide residues shown in SEQ ID NO:140, and where b is greater than or equal to a+14.

[1016] Features of Protein Encoded by Gene No: 131

[1017] This gene is expressed primarily in prostate, and to a lesser extent in amygdala and pancreatic tumors.

[1018] Polynucleotides and polypeptides of the invention are useful as reagents for differential identification of the tissue(s) or cell type(s) present in a biological sample and for diagnosis of diseases and conditions which include, but are not limited to, prostate enlargement and gastrointestinal disorders, particularly of the pancreas and gall bladder. Similarly, polypeptides and antibodies directed to these polypeptides are useful in providing immunological probes for differential identification of the tissue(s) or cell type(s). For a number of disorders of the above tissues or cells, particularly of the reproductive system, expression of this gene at significantly higher or lower levels may be routinely detected in certain tissues or cell types (e.g. reproductive, cancerous and wounded tissues) or bodily fluids (e.g., lymph, serum, plasma, urine, synovial fluid and spinal fluid) or another tissue or cell sample taken from an individual having such a disorder, relative to the standard gene expression level, i.e., the expression level in healthy tissue or bodily fluid from an individual not having the disorder.

[1019] The tissue distribution in prostate indicates that the protein product of this gene is useful for the treatment and diagnosis of prostate or reproductive diseases, including benign prostatic hyperplasia and prostate cancer. In addition, the tissue distribution in tumors of the pancreas indicates that the protein product of this gene is useful for the diagnosis and intervention of these tumors, in addition to other tissues where expression has been indicated. Protein, as well as, antibodies directed against the protein may show utility as a tumor marker and/or immunotherapy targets for the above listed tumors and tissues.

[1020] Many polynucleotide sequences, such as EST sequences, are publicly available and accessible through sequence databases. Some of these sequences are related to SEQ ID NO:141 and may have been publicly available prior to conception of the present invention. Preferably, such related polynucleotides are specifically excluded from the scope of the present invention. To list every related sequence is cumbersome. Accordingly, preferably excluded from the present invention are one or more polynucleotides comprising a nucleotide sequence described by the general formula of a-b, where a is any integer between 1 to 707 of SEQ ID NO:141, b is an integer of 15 to 721, where both a and b correspond to the positions of nucleotide residues shown in SEQ ID NO:141, and where b is greater than or equal to a+14.

[1021] Features of Protein Encoded by Gene No: 132

[1022] The gene encoding the disclosed cDNA is thought to reside on chromosome 3. Accordingly, polynucleotides related to this invention are useful as a marker in linkage analysis for chromosome 3.

[1023] This gene is expressed primarily in adult lung, and to a lesser extent in the hypothalamus.

[1024] Polynucleotides and polypeptides of the invention are useful as reagents for differential identification of the tissue(s) or cell type(s) present in a biological sample and for diagnosis of diseases and conditions which include, but are not limited to, pulmonary diseases and neurological disorders. Similarly, polypeptides and antibodies directed to these polypeptides are useful in providing immunological probes for differential identification of the tissue(s) or cell type(s). For a number of disorders of the above tissues or cells, particularly of the pulmonary and respiratory systems, expression of this gene at significantly higher or lower levels may be routinely detected in certain tissues or cell types (e.g. lung, brain, cancerous and wounded tissues) or bodily fluids (e.g., lymph, serum, plasma, urine, synovial fluid and spinal fluid) or another tissue or cell sample taken from an individual having such a disorder, relative to the standard gene expression level, i.e., the expression level in healthy tissue or bodily fluid from an individual not having the disorder.

[1025] The tissue distribution in adult lung indicates that the protein product of this gene is useful for the diagnosis and treatment of pulmonary and respiratory disorders such as emphysema, pneumonia, and pulmonary edema and emboli. In addition, the tissue distribution indicates that the protein product of this gene is useful for the detection/treatment of neurodegenerative disease states and behavioral disorders such as Alzheimer's Disease, Parkinson's Disease, Huntington's Disease, schizophrenia, mania, dementia, paranoia, obsessive compulsive disorder and panic disorder. In addition, the gene or gene product may also play a role in the treatment and/or detection of developmental disorders associated with the developing embryo, sexually-linked disorders, or disorders of the cardiovascular system. Protein, as well as, antibodies directed against the protein may show utility as a tissue-specific marker and/or immunotherapy target for the above listed tissues.

[1026] Many polynucleotide sequences, such as EST sequences, are publicly available and accessible through sequence databases. Some of these sequences are related to SEQ ID NO:142 and may have been publicly available prior to conception of the present invention. Preferably, such related polynucleotides are specifically excluded from the scope of the present invention. To list every related sequence is cumbersome. Accordingly, preferably excluded from the present invention are one or more polynucleotides comprising a nucleotide sequence described by the general formula of a-b, where a is any integer between 1 to 1454 of SEQ ID NO:142, b is an integer of 15 to 1468, where both a and b correspond to the positions of nucleotide residues shown in SEQ ID NO:142, and where b is greater than or equal to a+14.

[1027] Features of Protein Encoded by Gene No: 133

[1028] This gene is expressed primarily in human liver.

[1029] Polynucleotides and polypeptides of the invention are useful as reagents for differential identification of the tissue(s) or cell type(s) present in a biological sample and for diagnosis of diseases and conditions which include, but are not limited to, cirrhosis of the liver and other hepatic disorders. Similarly, polypeptides and antibodies directed to these polypeptides are useful in providing immunological probes for differential identification of the tissue(s) or cell type(s). For a number of disorders of the above tissues or cells, particularly of the digestive system, expression of this gene at significantly higher or lower levels may be routinely detected in certain tissues or cell types (e.g. liver, cancerous and wounded tissues) or bodily fluids (e.g., lymph, serum, plasma, urine, synovial fluid and spinal fluid) or another tissue or cell sample taken from an individual having such a disorder, relative to the standard gene expression level, i.e., the expression level in healthy tissue or bodily fluid from an individual not having the disorder.

[1030] The tissue distribution in human liver indicates that the protein product of this gene is useful for the detection and treatment of liver disorders and cancers (e.g. hepatoblastoma, jaundice, hepatitis, liver metabolic diseases and conditions that are attributable to the differentiation of hepatocyte progenitor cells). Protein, as well as, antibodies directed against the protein may show utility as a tumor marker and/or immunotherapy targets for the above listed tissues.

[1031] Many polynucleotide sequences, such as EST sequences, are publicly available and accessible through sequence databases. Some of these sequences are related to SEQ ID NO:143 and may have been publicly available prior to conception of the present invention. Preferably, such related polynuc Leotides are specifically excluded from the scope of the present invention. To list every related sequence is cumbersome. Accordingly, preferably excluded from the present invention are one or more polynucleotides comprising a nucleotide sequence described by the general formula of a-b, where a is any integer between 1 to 286 of SEQ ID NO:143, b is an integer of 15 to 300, where both a and b correspond to the positions of nucleotide residues shown in SEQ ID NO:143, and where b is greater than or equal to a+14.

[1032] Features of Protein Encoded by Gene No: 134

[1033] The gene encoding the disclosed cDNA is thought to reside on chromosome 5. Accordingly, polynucleotides related to this invention are useful as a marker in linkage analysis for chromosome 5.

[1034] This gene is expressed primarily in fetal kidney, and to a lesser extent in fetal liver and spleen.

[1035] Polynucleotides and polypeptides of the invention are useful as reagents for differential identification of the tissue(s) or cell type(s) present in a biological sample and for diagnosis of diseases and conditions which include, but are not limited to, development and regeneration of liver and kidney and immunological disorders. Similarly, polypeptides and antibodies directed to these polypeptides are useful in providing immunological probes for differential identification of the tissue(s) or cell type(s). For a number of disorders of the above tissues or cells, particularly of the digestive and excretory systems, expression of this gene at significantly higher or lower levels may be routinely detected in certain tissues or cell types (e.g. kidney, liver, spleen, cancerous and wounded tissues) or bodily fluids (e.g., lymph, serum, plasma, urine, synovial fluid and spinal fluid) or another tissue or cell sample taken from an individual having such a disorder, relative to the standard gene expression level, i.e., the expression level in healthy tissue or bodily fluid from an individual not having the disorder.

[1036] Predicted epitopes include those comprising a sequence shown in SEQ ID NO:382 as residues: Pro-70 to Arg-77, Tyr-102 to Thr-107.

[1037] The tissue distribution in fetal kidney indicates that the protein product of this gene is useful for the diagnosis and treatment of diseases of the kidney and liver, such as cirrhosis, kidney failure, kidney stones, and liver failure, hepatoblastoma, jaundice, hepatitis, liver metabolic diseases and conditions that are attributable to the differentiation of hepatocyte progenitor cells. In addition the expression in fetus would suggest a useful role for the protein product in developmental abnormalities, fetal deficiencies, pre-natal disorders and various would-healing models and/or tissue trauma. Protein, as well as, antibodies directed against the protein may show utility as a tumor marker and/or immunotherapy targets for the above listed tissues.

[1038] Many polynucleotide sequences, such as EST sequences, are publicly available and accessible through sequence databases. Some of these sequences are related to SEQ ID NO:144 and may have been publicly available prior to conception of the present invention. Preferably, such related polynucleotides are specifically excluded from the scope of the present invention. To list every related sequence is cumbersome. Accordingly, preferably excluded from the present invention are one or more polynucleotides comprising a nucleotide sequence described by the general formula of a-b, where a is any integer between 1 to 2229 of SEQ ID NO:144, b is an integer of 15 to 2243, where both a and b correspond to the positions of nucleotide residues shown in SEQ ID NO:144, and where b is greater than or equal to a+14.

[1039] Features of Protein Encoded by Gene No: 135

[1040] This gene is expressed primarily in brain, bone marrow, and to a lesser extent in placenta, T cell, testis and neutrophils.

[1041] Polynucleotides and polypeptides of the invention are useful as reagents for differential identification of the tissue(s) or cell type(s) present in a biological sample and for diagnosis of diseases and conditions which include, but are not limited to, neurodegenerative and immunological diseases and cancer. Similarly, polypeptides and antibodies directed to these polypeptides are useful in providing immunological probes for differential identification of the tissue(s) or cell type(s). For a number of disorders of the above tissues or cells, particularly of the nervous and immune systems, expression of this gene at significantly higher or lower levels may be routinely detected in certain tissues or cell types (e.g., CNS, immune, cancerous and wounded tissues) or bodily fluids (e.g., lymph, serum, seminal fluid, plasma, urine, synovial fluid and spinal fluid) or another tissue or cell sample taken from an individual having such a disorder, relative to the standard gene expression level, i.e., the expression level in healthy tissue or bodily fluid from an individual not having the disorder.

[1042] Predicted epitopes include those comprising a sequence shown in SEQ ID NO:383 as residues: Met-1 to His-6.

[1043] The tissue distribution in brain indicates that the protein product of this gene is useful for the detection/treatment of neurodegenerative disease states and behavioral disorders such as Alzheimer's Disease, Parkinson's Disease, Huntington's Disease, schizophrenia, mania, dementia, paranoia, obsessive compulsive disorder and panic disorder. In addition, the gene or gene product may also p Lay a role in the treatment and/or detection of developmental disorders associated with the developing embryo, or sexually-linked disorders. Furthermore, the tissue distribution indicates that the protein product of this gene is useful for the diagnosis and/or treatment of hematopoietic disorders. This gene product is expressed in hematopoietic cells and tissues, suggesting that it plays a role in the survival, proliferation, and/or differentiation of hematopoietic lineages. Expression of this gene product in T cells and neutrophils also strongly indicates a role for this protein in immune function and immune surveillance.

[1044] Many polynucleotide sequences, such as EST sequences, are publicly available and accessible through sequence databases. Some of these sequences are related to SEQ ID NO:145 and may have been publicly available prior to conception of the present invention. Preferably, such related polynucleotides are specifically excluded from the scope of the present invention. To list every related sequence is cumbersome. Accordingly, preferably excluded from the present invention are one or more polynucleotides comprising a nucleotide sequence described by the general formula of a-b, where a is any integer between 1 to 1068 of SEQ ID NO:145, b is an integer of 15 to 1082, where both a and b correspond to the positions of nucleotide residues shown in SEQ ID NO:145, and where b is greater than or equal to a+14.

[1045] Features of Protein Encoded by Gene No: 136

[1046] The translation product of this gene is homologous to the human WD repeat protein HAN11, which is thought to function in signal transduction pathways.

[1047] In specific embodiments, polypeptides of the invention comprise, or alternatively consists of, an amino acid sequence selected from the group: MSLHGKRKEIYKYEAPWTVYAMNWSVRPDKRFRLALGSFVEEYNNKVQLV GLDEESSEFICRNTFDHPYPTTKLMWIPDTKGVYPDLLATSGDYLRVWRVGE TETRLECLLNNNKNSDFCAPLTSFDWNEVDPYLLGTSSSIDTTCTIWGLETGQV LGRVNLVSGHVKTQLIAHDKEVYDIAFSRAGGGRDMFASVGADGSVRMFDL RHLEHSTIIYEDPQHHPLLRLCWNKQDPNYLATMAMDGMEVVILDVRVPAH LXPGTTIEHVSMALLGPHIHPATSALQRMTTRLSSGTSSKCPEPLRTLSWPTQL XGEINNVQWASTQPELSPSATTTAWRYSECSVGGAVPTRQGLLYFLPLPHPQS (SEQ ID NO:1008), MSLHGKRKEIYKYEAPWTVYAMNWSVRPDKRFRLALGSFVEEYNNKVQLV GLDEESSEFICRNTFDHPYPTTKLMWIPDTKGVYPDLLATSGDYLRVWRVGE TETRLECLLNNNKNSDFCAPLTSFDWNEVDPYLL (SEQ ID NO:1009), SFDWNEVDPYLLGTSSIDTTCTIWGLETGQVLGRVNLVSGHVKTQLIAHDKE VYDIAFSRAGGGRDMFASVGADGSVRMFDLRHLEISTIIYEDPQHHPLLRLC WNKQDPNYLATMAMDGMEVVILDVRVPAHLXPGTTI (SEQ ID NO:1010), and/or VGADGSVRMFDLRHLEHSTIIYEDPQHHPLLRLCWNKQD PNYLATMAMDGMEVVILDVRVPAHLXPGTTIEHVSMALLGPHIHPATSALQR MTTRLSSGTSSKCPEPLRTLSWPTQLXGE NNVQWASTQPELSPSATTTAWRY SECSVGGAVPTRQGLLYFLPLPHPQS (SEQ ID NO:1011). Moreover, fragments and variants of these polypeptides (such as, for example, fragments as described herein, polypeptides at least 80%, 85%, 90%, 95%, 96%, 97%, 98%, or 99% identical to these polypeptides and polypeptides encoded by the polynucleotide which hybridizes, under stringent conditions, to the polynucleotide encoding these polypeptides) are encompassed by the invention. Antibodies that bind polypeptides of the invention are also encompassed by the invention. Polynucleotides encoding these polypeptides are also encompassed by the invention.

[1048] The gene encoding the disclosed cDNA is thought to reside on chromosome 17. Accordingly, polynucleotides related to this invention are useful as a marker in linkage analysis for chromosome 17.

[1049] This gene is expressed primarily in placenta, embryo, T cell and fetal lung, and to a lesser extent in endothelial, tonsil and bone marrow.

[1050] Polynucleotides and polypeptides of the invention are useful as reagents for differential identification of the tissue(s) or cell type(s) present in a biological sample and for diagnosis of diseases and conditions which include, but are not limited to, immunological and developmental diseases in addition to cancers. Similarly, polypeptides and antibodies directed to these polypeptides are useful in providing immunological probes for differential identification of the tissue(s) or cell type(s). For a number of disorders of the above tissues or cells, particularly of the immune system, expression of this gene at significantly higher or lower levels may be routinely detected in certain tissues or cell types (e.g. immune, cancerous and wounded tissues) or bodily fluids (e.g., lymph, serum, plasma, urine, synovial fluid and spinal fluid) or another tissue or cell sample taken from an individual having such a disorder, relative to the standard gene expression level, i.e., the expression level in healthy tissue or bodily fluid from an individual not having the disorder.

[1051] Predicted epitopes include those comprising a sequence shown in SEQ ID NO:384 as residues: Gly-19 to Gln-28, Pro-36 to Phe-42.

[1052] The tissue distribution in tumors of colon, ovary, and breast origins indicates that the protein product of this gene is useful for the diagnosis and intervention of these tumors, in addition to other tumors where expression has been indicated. Because the gene is expressed in cells of lymphoid origin, the natural gene product may be involved in immune functions. Therefore it may also be used as an agent for immunological disorders including arthritis, asthma, immune deficiency diseases such as AIDS, and leukemia. Protein, as well as, antibodies directed against the protein may show utility as a tumor marker and/or immunotherapy targets for the above listed tumors and tissues.

[1053] Many polynucleotide sequences, such as EST sequences, are publicly available and accessible through sequence databases. Some of these sequences are related to SEQ ID NO:146 and may have been publicly available prior to conception of the present invention. Preferably, such related polynucleotides are specifically excluded from the scope of the present invention. To list every related sequence is cumbersome. Accordingly, preferably excluded from the present invention are one or more polynucleotides comprising a nucleotide sequence described by the general formula of a-b, where a is any integer between 1 to 4299 of SEQ ID NO:146, b is an integer of 15 to 4313, where both a and b correspond to the positions of nucleotide residues shown in SEQ ID NO:146, and where b is greater than or equal to a+14.

[1054] Features of Protein Encoded by Gene No: 137

[1055] This gene is expressed primarily in TNF and INF induced epithelial cells, T cells and kidney.

[1056] Polynucleotides and polypeptides of the invention are useful as reagents for differential identification of the tissue(s) or cell type(s) present in a biological sample and for diagnosis of diseases and conditions which include, but are not limited to, inflammatory conditions particularly inflammatory reactions in the kidney. Similarly, polypeptides and antibodies directed to these polypeptides are useful in providing immunological probes for differential identification of the tissue(s) or cell type(s). For a number of disorders of the above tissues or cells, particularly of renal system, expression of this gene at significantly higher or lower levels may be routinely detected in certain tissues or cell types (e.g. kidney, immune, cancerous and wounded tissues) or bodily fluids (e.g., lymph, serum, plasma, urine, synovial fluid and spinal fluid) or another tissue or cell sample taken from an individual having such a disorder, relative to the standard gene expression level, i.e., the expression level in healthy tissue or bodily fluid from an individual not having the disorder.

[1057] Predicted epitopes include those comprising a sequence shown in SEQ ID NO:385 as residues: Thr-67 to Gly-72, Gln-132 to Ala-145, Arg-150 to Pro-157.

[1058] The tissue distribution in TNF and INF induced epithelial cells indicates that the protein products of this gene are useful for treating the damage caused by inflammation of the kidney. Furthermore, the tissue distribution in kidney indicates that this gene or gene product is useful in the treatment and/or detection of kidney diseases including renal failure, nephritus, renal tubular acidosis, proteinuria, pyuria, edema, pyelonephritis, hydronephritis, nephrotic syndrome, crush syndrome, glomerulonephritis, hematuria, renal colic and kidney stones, in addition to Wilms Tumor Disease, and congenital kidney abnormalities such as horseshoe kidney, polycystic kidney, and Falconi's syndrome. Protein, as well as, antibodies directed against the protein may show utility as a tumor marker and/or immunotherapy targets for the above listed tissues.

[1059] Many polynucleotide sequences, such as EST sequences, are publicly available and accessible through sequence databases. Some of these sequences are related to SEQ ID NO:147 and may have been publicly available prior to conception of the present invention. Preferably, such related polynucleotides are specifically excluded from the scope of the present invention. To list every related sequence is cumbersome. Accordingly, preferably excluded from the present invention are one or more polynucleotides comprising a nucleotide sequence described by the general formula of a-b, where a is any integer between 1 to 1169 of SEQ ID NO:147, b is an integer of 15 to 1183, where both a and b correspond to the positions of nucleotide residues shown in SEQ ID NO:147, and where b is greater than or equal to a+14.

[1060] Features of Protein Encoded by Gene No: 138

[1061] The gene encoding the disclosed cDNA is thought to reside on chromosome 1. Accordingly, polynucleotides related to this invention are useful as a marker in linkage analysis for chromosome 1. (See Genbank Accession No. D63485).

[1062] This gene is expressed primarily in breast cancer and colon cancer, and to a lesser extent in thymus and fetal spleen.

[1063] Polynucleotides and polypeptides of the invention are useful as reagents for differential identification of the tissue(s) or cell type(s) present in a biological sample and for diagnosis of diseases and conditions which include, but are not limited to, cancers, especially of the breast and colon tissues. Similarly, polypeptides and antibodies directed to these polypeptides are useful in providing immunological probes for differential identification of the tissue(s) or cell type(s). For a number of disorders of the above tissues or cells, particularly of the immune system, expression of this gene at significantly higher or lower levels may be routinely detected in certain tissues or cell types (e.g. breast, colon, cancerous and wounded tissues) or bodily fluids (e.g., lymph, serum, plasma, urine, synovial fluid and spinal fluid) or another tissue or cell sample taken from an individual having such a disorder, relative to the standard gene expression level, i.e., the expression level in healthy tissue or bodily fluid from an individual not having the disorder.

[1064] The tissue distribution in tumors of colon and breast origins indicates that the protein product of this gene is useful for the diagnosis and intervention of these tumors, in addition to other tumors where expression has been indicated. Protein, as well as, antibodies directed against the protein may show utility as a tumor marker and/or immunotherapy targets for the above listed tumors and tissues.

[1065] Many polynucleotide sequences, such as EST sequences, are publicly available and accessible through sequence databases. Some of these sequences are related to SEQ ID NO:148 and may have been publicly available prior to conception of the present invention. Preferably, such related polynucleotides are specifically excluded from the scope of the present invention. To list every related sequence is cumbersome. Accordingly, preferably excluded from the present invention are one or more polynucleotides comprising a nucleotide sequence described by the general formula of a-b, where a is any integer between 1 to 720 of SEQ ID NO:148, b is an integer of 15 to 734, where both a and b correspond to the positions of nucleotide residues shown in SEQ ID NO:148, and where b is greater than or equal to a+14.

[1066] Features of Protein Encoded by Gene No: 139

[1067] The gene encoding the disclosed cDNA is thought to reside on chromosome 17. Accordingly, polynucleotides related to this invention are useful as a marker in linkage analysis for chromosome 17.

[1068] This gene is expressed primarily in CD34 positive cells, and to lesser extent in activated T-cells and neutrophils.

[1069] Polynucleotides and polypeptides of the invention are useful as reagents for differential identification of the tissue(s) or cell type(s) present in a biological sample and for diagnosis of diseases and conditions which include, but are not limited to, immune related diseases and hematopoietic disorders. Similarly, polypeptides and antibodies directed to these polypeptides are useful in providing immunological probes for differential identification of the tissue(s) or cell type(s). For a number of disorders of the above tissues or cells, particularly of the immune system and hematopoietic system, expression of this gene at significantly higher or lower levels may be routinely detected in certain tissues or cell types (e.g. immune, cancerous and wounded tissues) or bodily fluids (e.g., lymph, serum, plasma, urine, synovial fluid and spinal fluid) or another tissue or cell sample taken from an individual having such a disorder, relative to the standard gene expression level, i.e., the expression level in healthy tissue or bodily fluid from an individual not having the disorder.

[1070] The tissue distribution in CD34 positive cells, T-cells and neutrophils indicates that the protein product of this gene is useful for the treatment and diagnosis of hematopoietic disorders and immune related diseases, such as anemia, leukemia, inflammation, infection, allergy, immunodeficiency disorders, arthritis, asthma, immune deficiency diseases such as AIDS. Furthermore, this gene product may be involved in the regulation of cytokine production, antigen presentation, or other processes that may also suggest a usefulness in the treatment of cancer (e.g. by boosting immune responses). Since the gene is expressed in cells of lymphoid origin, the gene or protein, as well as, antibodies directed against the protein may show utility as a tumor marker and/or immunotherapy targets for the above listed tissues. In addition, this gene product may have commercial utility in the expansion of stem cells and committed progenitors of various blood lineages, and in the differentiation and/or proliferation of various cell types. Expression of this gene product in T cells and neutrophils also strongly indicates a role for this protein in immune function and immune surveillance. Protein, as well as, antibodies directed against the protein may show utility as a tumor marker and/or immunotherapy targets for the above listed tissues.

[1071] Many polynucleotide sequences, such as EST sequences, are publicly available and accessible through sequence databases. Some of these sequences are related to SEQ ID NO:149 and may have been publicly available prior to conception of the present invention. Preferably, such related polynucleotides are specifically excluded from the scope of the present invention. To list every related sequence is cumbersome. Accordingly, preferably excluded from the present invention are one or more polynucleotides comprising a nucleotide sequence described by the general formula of a-b, where a is any integer between 1 to 1391 of SEQ ID NO:149, b is an integer of 15 to 1405, where both a and b correspond to the positions of nucleotide residues shown in SEQ ID NO:149, and where b is greater than or equal to a+14.

[1072] Features of Protein Encoded by Gene No: 140

[1073] This gene was recently published by another group, who called the gene KIAA0313 gene. (See Genbank Accession No. d1021609.)

[1074] In specific embodiments, polypeptides of the invention comprise, or alternatively consists of, an amino acid sequence selected from the group: LYATATVISSPSTEXLSQDQGDRASLDAADSGRGSWTSCSSGSHDNIQTIQHQ RSWETLPFGHTHFDYSGDPAGLWASSSHMDQIMFSDHSTKYNRQNQSRESLE QAQSRASWASSTGYWGEDSEGDTGTIKRRGGKDVSIEAESSSLTSVTTEETKP VPMPAHIAVASSTTKGLIARKEGRYREPPPTPPGYIGIPITDFPEGHSHPARKPP DYNVALQRSRMVARSSDTAGPSSVQQPHGHPTSSRPVNKPQWHKXNESDPR LAPYQSQGFSTEEDEDEQVSAV (SEQ ID NO:1012), HMDQIMFSDHSTKYNRQNQSRESLEQAQSRASWASSTGYWGE (SEQ ID NO:1013), SVTTEETKPVPMPAHIAVASSTTKGLIARKEGRYREPPPTPPGYIGIPITD (SEQ ID NO:1014), and/or VALQRSRMVARSSDTAGPSSVQQPHGHPTSSRPVNKPQWHKXNESDPRLAP YQSQGF (SEQ ID NO:1015). Moreover, fragments and variants of these polypeptides (such as, for example, fragments as described herein, polypeptides at least 80%, 85%, 90%, 95%, 96%, 97%, 98%, or 99% identical to these polypeptides and polypeptides encoded by the polynucleotide which hybridizes, under stringent conditions, to the polynucleotide encoding these polypeptides) are encompassed by the invention. Antibodies that bind polypeptides of the invention are also encompassed by the invention. Polynucleotides encoding these polypeptides are also encompassed by the invention.

[1075] The gene encoding the disclosed cDNA is thought to reside on chromosome 4. Accordingly, polynucleotides related to this invention are useful as a marker in linkage analysis for chromosome 4. (See Genbank Accession No. AB002311).

[1076] This gene is expressed primarily in ovarian cancer, tumors of the Testis, brain, and colon.

[1077] Polynucleotides and polypeptides of the invention are useful as reagents for differential identification of the tissue(s) or cell type(s) present in a biological sample and for diagnosis of diseases and conditions which include, but are not limited to, ovarian, testicle, brain and colon cancers. Similarly, polypeptides and antibodies directed to these polypeptides are useful in providing immunological probes for differential identification of the tissue(s) or cell type(s). For a number of disorders of the above tissues or cells, particularly of the male and female reproductive systems, expression of this gene at significantly higher or lower levels may be routinely detected in certain tissues or cell types (e.g. brain, testis, colon, ovary, cancerous and wounded tissues) or bodily fluids (e.g., lymph, serum, plasma, urine, synovial fluid and spinal fluid) or another tissue or cell sample taken from an individual having such a disorder, relative to the standard gene expression level, i e., the expression level in healthy tissue or bodily fluid from an individual not having the disorder.

[1078] The tissue distribution in tumors of colon, ovary, testis, and brain origins indicates that the protein product of this gene is useful for the diagnosis and intervention of these tumors, in addition to other tumors where expression has been indicated. Protein, as well as, antibodies directed against the protein may show utility as a tumor marker and/or immunotherapy targets for the above listed tumors and tissues.

[1079] Many polynucleotide sequences, such as EST sequences, are publicly available and accessible through sequence databases. Some of these sequences are related to SEQ ID NO:150 and may have been publicly available prior to conception of the present invention. Preferably, such related polynucleotides are specifically excluded from the scope of the present invention. To list every related sequence is cumbersome. Accordingly, preferably excluded from the present invention are one or more polynucleotides comprising a nucleotide sequence described by the general formula of a-b, where a is any integer between 1 to 2876 of SEQ ID NO:150, b is an integer of 15 to 2890, where both a and b correspond to the positions of nucleotide residues shown in SEQ ID NO:150, and where b is greater than or equal to a+14.

[1080] Features of Protein Encoded by Gene No: 141

[1081] The gene encoding the disclosed cDNA is thought to reside on chromosome 18. Accordingly, polynucleotides related to this invention are useful as a marker in linkage analysis for chromosome 18.

[1082] This gene is expressed primarily in spleen and colon cancer.

[1083] Polynucleotides and polypeptides of the invention are useful as reagents for differential identification of the tissue(s) or cell type(s) present in a biological sample and for diagnosis of diseases and conditions which include, but are not limited to, colon cancer and immunological disorders. Similarly, polypeptides and antibodies directed to these polypeptides are useful in providing immunological probes for differential identification of the tissue(s) or cell type(s). For a number of disorders of the above tissues or cells, particularly of the gastrointestinal tract and immune systems, expression of this gene at significantly higher or lower levels may be routinely detected in certain tissues or cell types (e.g. spleen, colon, cancerous and wounded tissues) or bodily fluids (e.g., lymph, serum, plasma, urine, synovial fluid and spinal fluid) or another tissue or cell sample taken from an individual having such a disorder, relative to the standard gene expression level, i.e., the expression level in healthy tissue or bodily fluid from an individual not having the disorder.

[1084] The tissue distribution in colon tumors indicates that the protein product of this gene is useful for the diagnosis and intervention of such tumors, in addition to other tissues and cell types where expression has been indicated. This gene product may be involved in the regulation of cytokine production, antigen presentation, or other processes that may also suggest a usefulness in the treatment of cancer (e.g. by boosting immune responses). Since the gene is expressed in cells of lymphoid origin, the natural gene product may be involved in immune functions. Therefore it may be also used as an agent for immunological disorders including arthritis, asthma, immunodeficiency diseases such as AIDS, leukemia, rheumatoid arthritis, granulomatous disease, inflammatory bowel disease, sepsis, acne, neutropenia, neutrophilia, psoriasis, hypersensitivities, such as T-cell mediated cytotoxicity; immune reactions to transplanted organs and tissues, such as host-versus-graft and graft-versus-host diseases, or autoimmunity disorders, such as autoimmune infertility, lens tissue injury, demyelination, systemic lupus erythematosis, drug induced hemolytic anemia, rheumatoid arthritis, Sjogren's disease, scleroderma and tissues. In addition, this gene product may have commercial utility in the expansion of stem cells and committed progenitors of various blood lineages, and in the differentiation and/or proliferation of various cell types. Protein, as well as, antibodies directed against the protein may show utility as a tumor marker and/or immunotherapy targets for the above listed tissues. Protein, as well as, antibodies directed against the protein may show utility as a tumor marker and/or immunotherapy targets for the above listed tumors and tissues.

[1085] Many polynucleotide sequences, such as EST sequences, are publicly available and accessible through sequence databases. Some of these sequences are related to SEQ ID NO:151 and may have been publicly available prior to conception of the present invention. Preferably, such related polynucleotides are specifically excluded from the scope of the present invention. To list every related sequence is cumbersome. Accordingly, preferably excluded from the present invention are one or more polynucleotides comprising a nucleotide sequence described by the general formula of a-b, where a is any integer between 1 to 2385 of SEQ ID NO:151, b is an integer of 15 to 2399, where both a and b correspond to the positions of nucleotide residues shown in SEQ ID NO:151, and where b is greater than or equal to a+14.

[1086] Features of Protein Encoded by Gene No: 142

[1087] The translation product of this gene is homologous to a T cell translocation protein, a putative zinc finger factor (See Genbank Accession No. 340454), as well as to the G-protein coupled receptor TM5 consensus polypeptide (See Genbank Accession No. R50734).

[1088] In specific embodiments, polypeptides of the invention comprise, or alternatively consists of, an amino acid sequence selected from the group: CLLFVFVSLGMRCLFWTIVYNVLYLKHKCNTVLLCYHLCSI (SEQ ID NO:1016), and/or ACSKLIPAFEMVMRAKDNVYHLDCFACQLCNQRXCVGDKFFLKNNXXLCQ TDYEEGLMKEGYAPXVR (SEQ ID NO:1017). Moreover, fragments and variants of these polypeptides (such as, for example, fragments as described herein, polypeptides at least 80%, 85%, 90%, 95%, 96%, 97%, 98%, or 99% identical to these polypeptides and polypeptides encoded by the polynucleotide which hybridizes, under stringent conditions, to the polynucleotide encoding these polypeptides) are encompassed by the invention. Antibodies that bind polypeptides of the invention are also encompassed by the invention. Polynucleotides encoding these polypeptides are also encompassed by the invention.

[1089] This gene is expressed primarily in fetal brain, and to a lesser extent in frontal cortex.

[1090] Polynucleotides and polypeptides of the invention are useful as reagents for differential identification of the tissue(s) or cell type(s) present in a biological sample and for diagnosis of diseases and conditions which include, but are not limited to, neurological disorders, including brain cancer. Similarly, polypeptides and antibodies directed to these polypeptides are useful in providing immunological probes for differential identification of the tissue(s) or cell type(s). For a number of disorders of the above tissues or cells, particularly of the Central Nervous System, expression of this gene at significantly higher or lower levels may be routinely detected in certain tissues or cell types (e.g. brain, cancerous and wounded tissues) or bodily fluids (e.g., lymph, serum, plasma, urine, synovial fluid and spinal fluid) or another tissue or cell sample taken from an individual having such a disorder, relative to the standard gene expression level, i.e., the expression level in healthy tissue or bodily fluid from an individual not having the disorder.

[1091] The tissue distribution in fetal brain indicates that the protein product of this gene is useful for the detection/treatment of neurodegenerative disease states and behavioral disorders such as Alzheimer's Disease, Parkinson's Disease, Huntington's Disease, schizophrenia, mania, dementia, paranoia, obsessive compulsive disorder and panic disorder. In addition, the gene or gene product may also play a role in the treatment and/or detection of developmental disorders associated with the developing embryo. Furthermore, elevated expression of this gene product within the frontal cortex of the brain indicates that it may be involved in neuronal survival; synapse formation; conductance; neural differentiation, etc. Such involvement may impact many processes, such as learning and cognition. It may also be useful in the treatment of such neurodegenerative disorders as schizophrenia; ALS; or Alzheimer's. Protein, as well as, antibodies directed against the protein may show utility as a tissue-specific marker and/or immunotherapy target for the above listed tissues.

[1092] Many polynucleotide sequences, such as EST sequences, are publicly available and accessible through sequence databases. Some of these sequences are related to SEQ ID NO:152 and may have been publicly available prior to conception of the present invention. Preferably, such related polynucleotides are specifically excluded from the scope of the present invention. To list every related sequence is cumbersome. Accordingly, preferably excluded from the present invention are one or more polynucleotides comprising a nucleotide sequence described by the general formula of a-b, where a is any integer between 1 to 788 of SEQ ID NO:152, b is an integer of 15 to 802, where both a and b correspond to the positions of nucleotide residues shown in SEQ ID NO:152, and where b is greater than or equal to a+14.

[1093] Features of Protein Encoded by Gene No: 143

[1094] The translation product of this gene has significant homology to the Fas ligand, which is a cysteine-rich type II transmembrane protein/tumor necrosis factor receptor homolog. Mutations within this protein have been shown to result in generalized lymphoproliferative diseases leading to the development of lymphadenopathy and autoimmune disease (See Medline Article No. 94185175).

[1095] In specific embodiments, polypeptides of the invention comprise, or alternatively consists of, the following amino acid sequence: SALSEPGAPDRRRPCPESVPRRPDDEQWPPPTALCLDVAPLPPSS (SEQ ID NO:1018). Moreover, fragments and variants of this polypeptide (such as, for example, fragments as described herein, polypeptides at least 80%, 85%, 90%, 95%, 96%, 97%, 98%, or 99% identical to these polypeptides and polypeptides encoded by the polynucleotide which hybridize, under stringent conditions, to the polynucleotide encoding this polypeptide are encompassed by the invention. Antibodies that bind polypeptides of the invention are also encompassed by the invention. Polynucleotides encoding this polypeptide are also encompassed by the invention. (See Genbank Accession No. 473565).

[1096] This gene is expressed primarily in osteoblasts, lung, and brain.

[1097] Polynucleotides and polypeptides of the invention are useful as reagents for differential identification of the tissue(s) or cell type(s) present in a biological sample and for diagnosis of diseases and conditions which include, but are not limited to, osteoblast-related, pulmonary, neurological, and immunological diseases. Similarly, polypeptides and antibodies directed to these polypeptides are useful in providing immunological probes for differential identification of the tissue(s) or cell type(s). For a number of disorders of the above tissues or cells, particularly of the skeletal and nervous systems, expression of this gene at significantly higher or lower levels may be routinely detected in certain tissues or cell types (e.g. lung, brain, skeletal, cancerous and wounded tissues) or bodily fluids (e.g., lymph, serum, plasma, urine, synovial fluid and spinal fluid) or another tissue or cell sample taken from an individual having such a disorder, relative to the standard gene expression level, i.e., the expression level in healthy tissue or bodily fluid from an individual not having the disorder.

[1098] Predicted epitopes include those comprising a sequence shown in SEQ ID NO:391 as residues: Trp-33 to Thr-40, Lys-45 to Ile-63.

[1099] The tissue distribution in osteoblasts, lung, and brain, combined with its homology to the Fas ligand, indicates that the protein product of this gene is useful for the diagnosis and intervention of these tumors, in addition to other tumors where expression has been indicated. Protein, as well as, antibodies directed against the protein may show utility as a tumor marker and/or immunotherapy targets for the above listed tumors and tissues. Because the Fas ligand gene is known to be expressed in cells of lymphoid origin, the natural gene product may be involved in immune functions. Therefore it may be also used as an agent for immunological disorders including asthma, immune deficiency diseases such as AIDS and leukemia, and various autoimmune disorders including lupus and arthritis. Protein, as well as, antibodies directed against the protein may show utility as a tissue-specific marker and/or immunotherapy target for the above listed tissues.

[1100] Many polynucleotide sequences, such as EST sequences, are publicly available and accessible through sequence databases. Some of these sequences are related to SEQ ID NO:153 and may have been publicly available prior to conception of the present invention. Preferably, such related polynucleotides are specifically excluded from the scope of the present invention. To list every related sequence is cumbersome. Accordingly, preferably excluded from the present invention are one or more polynucleotides comprising a nucleotide sequence described by the general formula of a-b, where a is any integer between 1 to 447 of SEQ ID NO:153, b is an integer of 15 to 461, where both a and b correspond to the positions of nucleotide residues shown in SEQ ID NO:153, and where b is greater than or equal to a+14.

[1101] Features of Protein Encoded by Gene No: 144

[1102] This gene shares sequence homology with a 21.5 KD transmembrane protein in the SEC15-SAP4 intergenic region of yeast. (See Genbank Accession No. 1723971.)

[1103] In specific embodiments, polypeptides of the invention comprise, or alternatively consists of, an amino acid sequence selected from the group: PVGYLDKQVPDTSVQETDRILVEKRCWDIALGPLKQIPMNLFI (SEQ ID NO:1019), AHASESGERWWACCGVRFGLRSIEAIGRSCCHDGPGGLVANRGRRFKWAIEL SGPGGGSRGRSDRGSGQGDSLYPVGYLDKQVPDTSVQETDRILVEKRCWDIA LGPLKQIPMNLFIMYMAGNTISIFPTMMVCMMAWRPIQALMAISATFKMLES SSQKFLQGLVYLIGNLMGLALAVYKCQSMGLLPTHASDWLAFIEPPERMEFS GGGLLL (SEQ ID NO:1020), PVGYLDKQVPDTSVQETDRILVEKRCW DIALGPLKQIPMNLFI (SEQ ID NO:1022), and/or ATFKMLESSSQKFLQGLVYLIGNLMGLALAVYKCQSMGLLPTHASD (SEQ ID NO:1021). Moreover, fragments and variants of these polypeptides (such as, for example, fragments as described herein, polypeptides at least 80%, 85%, 90%, 95%, 96%, 97%, 98%, or 99% identical to these polypeptides and polypeptides encoded by the polynucleotide which hybridizes, under stringent conditions, to the polynucleotide encoding these polypeptides) are encompassed by the invention. Antibodies that bind polypeptides of the invention are also encompassed by the invention. Polynucleotides encoding these polypeptides are also encompassed by the invention.

[1104] This gene is expressed primarily in osteoclastoma, hemangiopericytoma, liver, lung.

[1105] Polynucleotides and polypeptides of the invention are useful as reagents for differential identification of the tissue(s) or cell type(s) present in a biological sample and for diagnosis of diseases and conditions which include, but are not limited to, osteoclastoma, hemangiopericytoma, liver and lung tumors. Similarly, polypeptides and antibodies directed to these polypeptides are useful in providing immunological probes for differential identification of the above tissue(s) or cell type(s). For a number of disorders of the above tissues or cells, particularly of the lung and liver systems, expression of this gene at significantly higher or lower levels may be routinely detected in certain tissues or cell types (e.g. lung, liver, cancerous and wounded tissues) or bodily fluids (e.g., lymph, serum, plasma, urine, synovial fluid and spinal fluid) or another tissue or cell sample taken from an individual having such a disorder, relative to the standard gene expression level, i.e., the expression level in healthy tissue or bodily fluid from an individual not having the disorder.

[1106] The tissue distribution indicates that the protein product of this gene is useful for the diagnosis and/or treatment of tumors of the osteoclastoma, hemangiopericytoma, liver and lung, in addition to other tumors where expression has been indicated. Protein, as well as, antibodies directed against the protein may show utility as a tissue-specific marker and/or immunotherapy target for the above listed tissues.

[1107] Many polynucleotide sequences, such as EST sequences, are publicly available and accessible through sequence databases. Some of these sequences are related to SEQ ID NO:154 and may have been publicly available prior to conception of the present invention. Preferably, such related polynucleotides are specifically excluded from the scope of the present invention. To list every related sequence is cumbersome. Accordingly, preferably excluded from the present invention are one or more polynucleotides comprising a nucleotide sequence described by the general formula of a-b, where a is any integer between 1 to 2374 of SEQ ID NO:154, b is an integer of 15 to 2388, where both a and b correspond to the positions of nucleotide residues shown in SEQ ID NO:154, and where b is greater than or equal to a+14.

[1108] Features of Protein Encoded by Gene No: 145

[1109] The translation product of this gene shares homology with the glucagon-69 gene which may indicate this gene plays a role in regulating metabolism. (See Genbank Accession No. A60318)

[1110] In specific embodiments, polypeptides of the invention comprise, or alternatively consists of, an amino acid sequence selected from the group: PTTKLDIMEKKKHIQIRFPSFYHKLVDSGRMRSKRETRREDSDTKHNL (SEQ ID NO:1023), FLWKSLLLRYFKMRQH (SEQ ID NO:1024), and/or [sequence omitted] (SEQ ID NO:1025). Moreover, fragments and variants of these polypeptides (such as, for example, fragments as described herein, polypeptides at least 80%, 85%, 90%, 95%, 96%, 97%, 98%, or 99% identical to these polypeptides and polypeptides encoded by the polynucleotide which hybridizes, under stringent conditions, to the polynucleotide encoding these polypeptides) are encompassed by the invention. Antibodies that bind polypeptides of the invention are also encompassed by the invention. Polynucleotides encoding these polypeptides are also encompassed by the invention.

[1111] This gene is expressed primarily in brain, kidney, colon, and testis.

[1112] Polynucleotides and polypeptides of the invention are useful as reagents for differential identification of the tissue(s) or cell type(s) present in a biological sample and for diagnosis of diseases and conditions which include, but are not limited to, brain, kidney, colon, and testicular cancer. Similarly, polypeptides and antibodies directed to these polypeptides are useful in providing immunological probes for differential identification of the tissue(s) or cell type(s). For a number of disorders of the above tissues or cells, particularly of the male reproductive system, neurological, circulatory, and gastrointestinal systems, expression of this gene at significantly higher or lower levels may be routinely detected in certain tissues or cell types (e.g. brain, kidney, colon, testis, cancerous and wounded tissues) or bodily fluids (e.g., lymph, serum, plasma, urine, synovial fluid and spinal fluid) or another tissue or cell sample taken from an individual having such a disorder, relative to the standard gene expression level, i.e., the expression level in healthy tissue or bodily fluid from an individual not having the disorder.

[1113] The tissue distribution in brain, kidney, colon, and testis origins, indicates that the protein product of this gene is useful for the diagnosis and intervention of tumors of these tissues. The protein product of this gene is useful for the detection/treatment of neurodegenerative disease states, behavioral disorders, or inflammatory conditions such as Alzheimer's Disease, Parkinson's Disease, Huntington's Disease, Tourette's Syndrome, meningitis, encephalitis, demyelinating diseases, peripheral neuropathies, neoplasia, trauma, congenital malformations, spinal cord injuries, ischemia and infarction, aneurysms, hemorrhages, schizophrenia, mania, dementia, paranoia, obsessive compulsive disorder, panic disorder, learning disabilities, ALS, psychoses, autism, and altered behaviors, including disorders in feeding, sleep patterns, balance, and perception. In addition, elevated expression of this gene product in regions of the brain indicates that it plays a role in normal neural function. Potentially, this gene product is involved in synapse formation, neurotransmission, learning, cognition, homeostasis, or neuronal differentiation or survival. Moreover, the gene or gene product may also play a role in the treatment and/or detection of developmental disorders associated with the developing embryo, sexually-linked disorders, or disorders of the cardiovascular system. Protein, as well as, antibodies directed against the protein may show utility as a tumor marker and/or immunotherapy targets for the above listed tissues. Protein, as well as, antibodies directed against the protein may show utility as a tumor marker and/or immunotherapy targets for the above listed tumors and tissues. The tissue distribution indicates that the protein product of this gene is useful for the detection/treatment of neurodegenerative disease states and behavioral disorders such as Alzheimer's Disease, Parkinson's Disease, Huntington's Disease, schizophrenia, mania, dementia, paranoia, obsessive compulsive disorder and panic disorder. In addition, the gene or gene product may also play a role in the treatment and/or detection of developmental disorders associated with the developing embryo, sexually-linked disorders, or disorders of the cardiovascular system.

[1114] Many polynucleotide sequences, such as EST sequences, are publicly available and accessible through sequence databases. Some of these sequences are related to SEQ ID NO:155 and may have been publicly available prior to conception of the present invention. Preferably, such related polynucleotides are specifically excluded from the scope of the present invention. To list every related sequence is cumbersome. Accordingly, preferably excluded from the present invention are one or more polynucleotides comprising a nucleotide sequence described by the general formula of a-b, where a is any integer between 1 to 628 of SEQ ID NO:155, b is an integer of 15 to 642, where both a and b correspond to the positions of nucleotide residues shown in SEQ ID NO:155, and where b is greater than or equal to a+14.

[1115] Features of Protein Encoded by Gene No: 146

[1116] The translation product of this gene shares sequence homology with goliath protein, which is a Drosophila protein thought to be important in the regulation of gene expression during development. Protein may serve as a transcription factor.

[1117] In specific embodiments, polypeptides of the invention comprise, or alternatively consists of, an amino acid sequence selected from the group: TEHIIAVMITELRGKDILSYLEKNISVQMTIAVGTRMPPKNFSRGSLVFVSISFI VLMIISSAWLIFYFIQKIRYTNARDRNQRRLGDAAKKAISKLTTRTVKKGDKE TDPDFDHCAVCIESYKQNDVVRILPCKHVFHKSCVDPWLSEHCTCPMCKLNI LKALGIV (SEQ ID NO:1026), MTHPGTEHIIAVMITELRGKDILSYLEKNISVQMTIAVGTRMPPKNFSRGSLVF VSISFIVLMIISSAWLIFYFIQKIRYTNARDRNQRRLGDAAKKAISKLTTRTVKK GDKETDPDFDHCAVCIESYKQNDVVRILPCKHVFHKSCVDPWLSEHCTCPMC KLNILKALGIVPNLPCTDNVAFDMERLTRTQAVNRRSALGDLAGDNSLGLEP LRTSGISPLPQDGELTPRTGEINIAVTKEWFIIASFGLLSALTLCYMIIRATASLN ANEVEWF (SEQ ID NO:1027), TEHIIAVMITELRGKDILSYLEKNISVQMTIAVGTRMPPKNFSRGSLVFVSISFI VLMIISSAWLIFYF (SEQ ID NO:1028), SISFIVLMIISSAWLIFYFIQKIRYTNARDRNQRRLGDAAKKSKLTTRTVKKG DKE (SEQ ID NO:1029), VKKGDKETDPDFDHCAVCIESYKQNDVVRILPCKHVFHKSCVDPWLSEHCTC PMCKLNILKALGIV (SEQ ID NO:1030), MTHPGTEHIIAVMITELRGKDILSYLEKNISVQMTI AVGTRMPPKNFSRGSLVFVSISFIVLMIISSAWLIFYFIQKIRYTNARDRNQRRL GDAAKKAISKLTTRT (SEQ ID NO:1031), AAKKAISKLTTRTVKKGDKETDPDFDHCAVCIESYK QNDVVRILPCKIVFHK SCVDPWLSEHCTCPMCKLNILKALGIVPNLPC (SEQ ID NO:1032), TQAVNRRSALGDLAGDNSLGLEPLRTSGISPLPQDGELTPRTGEINIAVTKEWF IIASFGLLSALTLCYMIIRATASLNANEVEWF (SEQ ID NO:1033), PLHGVADHLGCDPQTRFFVPPNIKQWIALLQRGNCTFKEKISRAAFHNAVAV VIYNNKSKEEPVTMTHPGTEHIIAVMITELRGKDILSYLEKNISVQMTIAVGTR MPPKNFSRGSLVFVSISFIVLMIISSAWLIFYFIQKIRYTNARDRNQRRLGDAAK KAISKLTTRTVKKGDKETDPDFDHCAVCIESYKQNDVVRILPCKHVFHKSCV DPWLSEHCTCPMCKLNILKALGIVPNLPCTDNVAFDMERLTRTQAVNRRSAL GDLAGDNSLGLEPLRTSGISPLPQDGELTPRTGEINIAVTKEWFIIASFGLLSAL TLCYMIIRATASLNANEVEWF (SEQ ID NO:1034), and/or HGVADHLGCDPQTRFFVPPNIKQWIALLQRGNCTFKEKISRAAFHNAVAVVI YNNKSKEE (SEQ ID NO:1035). Moreover, fragments and variants of these polypeptides (such as, for example, fragments as described herein, polypeptides at least 80%, 85%, 90%, 95%, 96%, 97%, 98%, or 99% identical to these polypeptides and polypeptides encoded by the polynucleotide which hybridizes, under stringent conditions, to the polynucleotide encoding these polypeptides) are encompassed by the invention. Antibodies that bind polypeptides of the invention are also encompassed by the invention. Polynucleotides encoding these polypeptides are also encompassed by the invention. (See Genbank Accession No. 157535).

[1118] When tested against Jurkat cell lines, supernatants removed from cells containing this gene activated the GAS assay. Thus, it is Likely that this gene activates T-cells through the Jak-STAT signal transduction pathway. The gamma activating sequence (GAS) is a promoter element found upstream of many genes which are involved in the Jak-STAT pathway. The Jak-STAT pathway is a large, signal transduction pathway involved in the differentiation and proliferation of cells. Therefore, activation of the Jak-STAT pathway, reflected by the binding of the GAS element, can be used to indicate proteins involved in the proliferation and differentiation of cells.

[1119] This gene is expressed primarily in macrophage, breast, kidney and to a lesser extent in synovium, hypothalamus and rhabdomyosarcoma.

[1120] Polynucleotides and polypeptides of the invention are useful as reagents for differential identification of the tissue(s) or cell type(s) present in a biological sample and for diagnosis of diseases and conditions which include, but are not limited to, schizophrenia and cancer. Similarly, polypeptides and antibodies directed to these polypeptides are useful in providing immunological probes for differential identification of the tissue(s) or cell type(s). For a number of disorders of the above tissues or cells, particularly of the immune and neural system, expression of this gene at significantly higher or lower levels may be routinely detected in certain tissues or cell types (e.g. brain, kidney, immune, cancerous and wounded tissues) or bodily fluids (e.g., lymph, serum, plasma, urine, synovial fluid and spinal fluid) or another tissue or cell sample taken from an individual having such a disorder, relative to the standard gene expression level, i.e., the expression level in healthy tissue or bodily fluid from an individual not having the disorder.

[1121] The tissue distribution in macrophage, hypothalamus, and kidney, combined with the homology to a zinc finger protein indicates that the protein product of this gene is useful for the treatment of schizophrenia, kidney disease and other cancers. Furthermore, the tissue distribution in macrophage, breast, and kidney origins indicates that the protein product of this gene is useful for the diagnosis and intervention of tumors within these tissues, in addition to other tumors where expression has been indicated. Protein, as well as, antibodies directed against the protein may show utility as a tumor marker and/or immunotherapy targets for the above listed tumors and tissues. Because the gene is expressed in cells of lymphoid origin, the natural gene product may be involved in immune functions. Therefore it may be also used as an agent for immunological disorders including arthritis, asthma, immune deficiency diseases such as AIDS, and leukemia.

[1122] Many polynucleotide sequences, such as EST sequences, are publicly available and accessible through sequence databases. Some of these sequences are related to SEQ ID NO:156 and may have been publicly available prior to conception of the present invention. Preferably, such related polynucleotides are specifically excluded from the scope of the present invention. To list every related sequence is cumbersome. Accordingly, preferably excluded from the present invention are one or more polynucleotides comprising a nucleotide sequence described by the general formula of a-b, where a is any integer between 1 to 1237 o SEQ ID NO:156, b is an integer of 15 to 1251, where both a and b correspond to the positions of nucleotide residues shown in SEQ ID NO:156, and where b is greater than or equal to a+14.

[1123] Features of Protein Encoded by Gene No: 147

[1124] The translation product of this gene shares sequence homology with HNP36 protein, an equilibrative nucleoside transporter, which is thought to be important in gene transcription as well as serving as an important component of the nucleoside transport apparatus (See Genbank Accession No. 1845345).

[1125] In specific embodiments, polypeptides of the invention comprise, or alternatively consists of, an amino acid sequence selected from the group: MSGQGLAGFFASVAMICAIASGSELSESAFGYFITACAVIILTIICYLGLP RLEFYRYYQQLKLEGPGEQETKLDLISKGEEPRAGKEESGVSVSNSQPTNESH SIKAILKNISVLAFSVCFIFTITIGMFPAVTVEVKSSIAGSSTWERYFIPVSCFLTF NIFDWLGRSLTAVFMWPGKDSRWLPSWXLARLVFVPLLLLCNIKPRRYLTVV FEHDAWFIFFMAAFAFSNGYLASLCMCFGPKKVKPAEAETAEPSWPSSCVW VWHWGLFSPSCSGQLCDKGWTEGLPASLPVCLLPLPSARGDPEWSGGFFF (SE Q ID NO:1036), MSGQGLAGFFASVAMICAIASGSELSESAFGYFITACAVIILTIICYLGLPRLEF YRYYQQLKLEGPGEQETKLDLISKGEEPRAGKEESGVSVSNSQPTNESHSI (SEQ ID NO:1037), SGVSVSNSQPTNESHSIKAILKNISVLAFSVCFIFTITIGMFPAVTVEVKSSIAGS STWERYFIPVSCFLTFNIFDWLGRS (SEQ ID NO:1038), TIGMFPAVTVEVKSSIAGSSTWERYFIPVSCFLTFNIFDWLGRSLTAVFMWPG KDSRWLPSWXLARLVFVPLLLLCNIKPRRYLTVVFEHDA (SEQ ID NO:1039), and/or FGPKKVKPAEAETAEPSWPSSCVWVWHWGLFSPSCSGQLCDKGWTEGLPAS LPVCLLPLPSARGDPEWSGGFFF (SEQ ID NO:1040). Moreover, fragments and variants of these polypeptides (such as, for example, fragments as described herein, polypeptides at least 80%, 85%, 90%, 95%, 96%, 97%, 98%, or 99% identical to these polypeptides and polypeptides encoded by the polynucleotide which hybridizes, under stringent conditions, to the polynucleotide encoding these polypeptides) are encompassed by the invention. Antibodies that bind polypeptides of the invention are also encompassed by the invention. Polynucleotides encoding these polypeptides are also encompassed by the invention.

[1126] An additional embodiment is the polynucleotide fragments encoding these polypeptide fragments. The gene encoding the disclosed cDNA is thought to reside on chromosome 6. Accordingly, polynucleotides related to this invention are useful as a marker in linkage analysis for chromosome 6.

[1127] This gene is expressed primarily in eosinophils and aortic endothelium, and to a lesser extent in umbilical vein endothelial cell and thymus.

[1128] Polynucleotides and polypeptides of the invention are useful as reagents for differential identification of the tissue(s) or cell type(s) present in a biological sample and for diagnosis of diseases and conditions which include, but are not limited to, hemopoietic disease. Similarly, polypeptides and antibodies directed to these polypeptides are useful in providing immunological probes for differential identification of the tissue(s) or cell type(s). For a number of disorders of the above tissues or cells, particularly of the circulatory system, expression of this gene at significantly higher or lower levels may be routinely detected in certain tissues or cell types (e.g. circulatory, immune, cancerous and wounded tissues) or bodily fluids (e.g., lymph, serum, plasma, urine, synovial fluid and spinal fluid) or another tissue or cell sample taken from an individual having such a disorder, relative to the standard gene expression level, i.e., the expression level in healthy tissue or bodily fluid from an individual not having the disorder.

[1129] The tissue distribution eosinophils and aortic endothelium, combined with the homology to the HNP36 protein indicates that the protein product of this gene is useful for the treatment of blood neoplasias and other hemopoietic disease. Furthermore, elevated expression of this gene product by endothelial cells indicates that it may play vital roles in the regulation of endothelial cell function; secretion; proliferation; or angiogenesis. Protein, as well as, antibodies directed against the protein may show utility as a tumor marker and/or immunotherapy targets for the above listed tissues.

[1130] Many polynucleotide sequences, such as EST sequences, are publicly available and accessible through sequence databases. Some of these sequences are related to SEQ ID NO:157 and may have been publicly available prior to conception of the present invention. Preferably, such related polynucleotides are specifically excluded from the scope of the present invention. To list every related sequence is cumbersome. Accordingly, preferably excluded from the present invention are one or more polynucleotides comprising a nucleotide sequence described by the general formula of a-b, where a is any integer between 1 to 2113 of SEQ. ID NO:157, b is an integer of 15 to 2127, where both a and b correspond to the positions of nucleotide residues shown in SEQ ID NO:157, and where b is greater than or equal to a+14.

[1131] Features of Protein Encoded by Gene No: 148

[1132] The gene encoding the disclosed cDNA is thought to reside on chromosome 5. Accordingly, polynucleotides related to this invention are useful as a marker in linkage analysis for chromosome 5.

[1133] This gene is expressed primarily in breast cancer cell lines, thymus stromal cells, and ovary.

[1134] Polynucleotides and polypeptides of the invention are useful as reagents for differential identification of the tissue(s) or cell type(s) present in a biological sample and for diagnosis of diseases and conditions which include, but are not limited to, endocrine and female reproductive system diseases including breast cancer. Similarly, polypeptides and antibodies directed to these polypeptides are useful in providing immunological probes for differential identification of the tissue(s) or cell type(s). For a number of disorders of the above tissues or cells, particularly of the endocrine system, expression of this gene at significantly higher or lower levels may be routinely detected in certain tissues or cell types (e.g. thymus, ovary, cancerous and wounded tissues) or bodily fluids (e.g., lymph, serum, plasma, urine, synovial fluid and spinal fluid) or another tissue or cell sample taken from an individual having such a disorder, relative to the standard gene expression level, i.e., the expression level in healthy tissue or bodily fluid from an individual not having the disorder.

[1135] The tissue distribution in breast cancer cells and ovary indicates that the protein product of this gene is useful for the diagnosis and treatment of endocrine disorders. In addition, the tissue distribution in tumors of thymus, ovary, and breast origins indicates that the protein product of this gene is useful for diagnosis and intervention of these tumors, in addition to other tumors where expression has been indicated. Protein, as well as, antibodies directed against the protein may show utility as a tumor marker and/or immunotherapy targets for the above listed tumors and tissues

[1136] Many polynucleotide sequences, such as EST sequences, are publicly available and accessible through sequence databases. Some of these sequences are related to SEQ ID NO:158 and may have been publicly available prior to conception of the present invention. Preferably, such related polynucleotides are specifically excluded from the scope of the present invention. To list every related sequence is cumbersome. Accordingly, preferably excluded from the present invention are one or more polynucleotides comprising a nucleotide sequence described by the general formula of a-b, where a is any integer between 1 to 1611 of SEQ ID NO:158, b is an integer of 15 to 1625, where both a and b correspond to the positions of nucleotide residues shown in SEQ ID NO:158, and where b is greater than or equal to a+14.

[1137] Features of Protein Encoded by Gene No: 149

[1138] The translation product of this gene has homology to pmt1 and pmt 2, two conserved Schizosaccharomyces pombe genes.

[1139] In specific embodiments, polypeptides of the invention comprise, or alternatively consists of, an amino acid sequence selected from the group: DDDGFEIVPIEDPAKHRILDPEGLALGAVIASSKKAKRDLIDNSFNRYTFNEDE GELPEWFVQEEKQHRIRQLPVGKKEVEHYRKRWREINARPIXXXXXXXXXX XXXXXXXLEQTRKKAEAVVNTVDIXRTRES (SEQ ID NO:1041), DDDG FEIVPIEDPAKHRILDPEGLALGAVIASSKKAKRDLIDNSFNRYTF (SEQ ID NO:1042), and/or KRWREINARPIXXXXXXXXXXXXXXXXXLEQTRAEAVVNTVDIXRTRES (SEQ ID NO:1043). Moreover, fragments and variants of these polypeptides (such as, for example, fragments as described herein, polypeptides at least 80%, 85%, 90%, 95%, 96%, 97%, 98%, or 99% identical to these polypeptides and polypeptides encoded by the polynucleotide which hybridizes, under stringent conditions, to the polynucleotide encoding these polypeptides) are encompassed by the invention. Antibodies that bind polypeptides of the invention are also encompassed by the invention. Polynucleotides encoding these polypeptides are also encompassed by the invention. (See Genbank Accession No. e1216734).

[1140] This gene is expressed primarily in retina and ovary, and to a lesser extent in breast cancer cells, epididymus and osteosarcoma.

[1141] Polynucleotides and polypeptides of the invention are useful as reagents for differential identification of the tissue(s) or cell type(s) present in a biological sample and for diagnosis of diseases and conditions which include, but are not limited to, neuronal growth disorders, cancer and reproductive system disorders. Similarly, polypeptides and antibodies directed to these polypeptides are useful in providing immunological probes for differential identification of the tissue(s) or cell type(s). For a number of disorders of the above tissues or cells, particularly of the neural and reproductive system, expression of this gene at significantly higher or lower levels may be routinely detected in certain tissues or cell types (e.g. retina, ovary, reproductive, cancerous and wounded tissues) or bodily fluids (e.g., lymph, serum, plasma, urine, synovial fluid and spinal fluid) or another tissue or cell sample taken from an individual having such a disorder, relative to the standard gene expression level, i.e., the expression level in healthy tissue or bodily fluid from an individual not having the disorder.

[1142] Predicted epitopes include those comprising a sequence shown in SEQ ID NO:397 as residues: Met-1 to Gly-7.

[1143] The tissue distribution in ovary, breast cancer cells, and epididymus indicates that the protein product of this gene is useful for the diagnosis or treatment of reproductive system diseases and cancers, in addition to other tumors where expression has been indicated. Protein, as well as, antibodies directed against the protein may show utility as a tissue-specific marker and/or immunotherapy target for the above listed tissues.

[1144] Many polynucleotide sequences, such as EST sequences, are publicly available and accessible through sequence databases. Some of these sequences are related to SEQ ID NO:159 and may have been publicly available prior to conception of the present invention. Preferably, such related polynucleotides are specifically excluded from the scope of the present invention. To list every related sequence is cumbersome. Accordingly, preferably excluded from the present invention are one or more polynucleotides comprising a nucleotide sequence described by the general formula of a-b, where a is any integer between 1 to 1673 of SEQ ID NO:159, b is an integer of 15 to 1687, where both a and b correspond to the positions of nucleotide residues shown in SEQ ID NO:159, and where b is greater than or equal to a+14.

[1145] Features of Protein Encoded by Gene No: 150

[1146] In specific embodiments, polypeptides of the invention comprise, or alternatively consists of, an amino acid sequence selected from the group: MIKDKGRARTALTSSQPAHLCPENPLLHLKAAVKEKKRNKKKKTIGSPKRIQS PLNNKLLNSPAKTLPGACGSPQKLIDGFLKHEGPPAEKPLEELSASTSGVPGLS SLQSDPAGCVRPPAPNLAGAVEFNDVKTLLREWITTISDPMEEDILQVVKYCT DLIEEKDLEKLDLVIKYMKRLMQQSVESVWNMAFDFILDNVQVVLQQTYGS TLKVT (SEQ ID NO:1044), MIKDKGRARTALTSSQPAHLCPENPLLHLKAAVKEKKRNKKKKTIGSPKRIQ (SEQ ID NO:1045), KRIQSPLNNKLLNSPAKTLPGACGSPQKLIDGFLKHEGPPAEKPLEELSASTSG VPGLSSLQSDPAGCVRPPAPNLAGAVEFNDVKTLLREWITTI SDPM (SEQ ID NO:1046), TISDPMEEDILQVVKYCTDLIEEKDLEKLDLVIKYMKRLMQQSVESVWNMAF DFILDNVQVVLQQTYGSTLKVT (SEQ ID NO:1047), VCCKTTWTLSRIKSNAIFQTDSTDCCISLFMYFITRSSFSKSFSSIRSVQYFTTW RMSSSIGSEIVVIHSLSKVFTSLNSTAPARLGAGGLTQPAGSDCKLERPGPEV EAESSSRGFSAGGPSCFRNPSINFWGLPQAPGRVFAGLLSSLLFKGL (SEQ ID NO:1048), WTLSRIKSNAIFQTDSTDCCISLFM (SEQ ID NO:1049), FTTWRMSSSIGSEIVVIHSLSKVFTSLNSTAPARLGA (SEQ ID NO:1050), and/or GGPSCFRNPSINFWGLPQAPGRVFAGLL (SEQ ID NO:1051). Moreover, fragments and variants of these polypeptides (such as, for example, fragments as described herein, polypeptides at least 80%, 85%, 90%, 95%, 96%, 97%, 98%, or 99% identical to these polypeptides and polypeptides encoded by the polynucleotide which hybridizes, under stringent conditions, to the polynucleotide encoding these polypeptides) are encompassed by the invention. Antibodies that bind polypeptides of the invention are also encompassed by the invention. Polynucleotides encoding these polypeptides are also encompassed by the invention.

[1147] The gene encoding the disclosed cDNA is believed to reside on chromosome 2. Accordingly, polynucleotides related to this invention are useful as a marker in linkage analysis for chromosome 2.

[1148] This gene is expressed primarily in 12 week embryo, and to a lesser extent, in hemangiopericytoma and frontal cortex.

[1149] Polynucleotides and polypeptides of the invention are useful as reagents for differential identification of the tissue(s) or cell type(s) present in a biological sample and for diagnosis of diseases and conditions which include, but are not limited to, developmental or neural disorders, particularly hemangiopericytoma, and other proliferative conditions, including cancers. Similarly, polypeptides and antibodies directed to these polypeptides are useful in providing immunological probes for differential identification of the tissue(s) or cell type(s). For a number of disorders of the above tissues or cells, particularly of the neural system and developing systems, expression of this gene at significantly higher or lower levels may be routinely detected in certain tissues or cell types (e.g., developmental, neural, and cancerous and wounded tissues) or bodily fluids (e.g., lymph, amniotic fluid, serum, plasma, urine, synovial fluid and spinal fluid) or another tissue or cell sample taken from an individual having such a disorder, relative to the standard gene expression level, i.e., the expression level in healthy tissue or bodily fluid from an individual not having the disorder.

[1150] Predicted epitopes include those comprising a sequence shown in SEQ ID NO:398 as residues: Leu-4 to Lys-11.

[1151] The tissue distribution in embryonic and neural tissues indicates that the protein product of this gene is useful for the treatment of growth disorders, hemangiopericytoma and other soft tissue tumors. Moreover, the protein product of this gene is useful for the detection/treatment of neurodegenerative disease states, behavioral disorders, or inflammatory conditions such as Alzheimer's Disease, Parkinson's Disease, Huntington's Disease, Tourette's Syndrome, meningitis, encephalitis, demyelinating diseases, peripheral neuropathies, neoplasia, trauma, congenital malformations, spinal cord injuries, ischemia and infarction, aneurysms, hemorrhages, schizophrenia, mania, dementia, paranoia, obsessive compulsive disorder, panic disorder, learning disabilities, ALS, psychoses, autism, and altered behaviors, including disorders in feeding, sleep patterns, balance, and perception. In addition, elevated expression of this gene product in regions of the brain indicates that it plays a role in normal neural function. Potentially, this gene product is involved in synapse formation, neurotransmission, learning, cognition, homeostasis, or neuronal differentiation or survival. Moreover, the gene or gene product may also play a role in the treatment and/or detection of developmental disorders associated with the developing embryo, sexually-linked disorders, or disorders of the cardiovascular system. Protein, as well as, antibodies directed against the protein may show utility as a tumor marker and/or immunotherapy targets for the above listed tissues.

[1152] Many polynucleotide sequences, such as EST sequences, are publicly available and accessible through sequence databases. Some of these sequences are related to SEQ ID NO:160 and may have been publicly available prior to conception of the present invention. Preferably, such related polynucleotides are specifically excluded from the scope of the present invention. To list every related sequence is cumbersome. Accordingly, preferably excluded from the present invention are one or more polynucleotides comprising a nucleotide sequence described by the general formula of a-b, where a is any integer between 1 to 1828 of SEQ ID NO:160, b is an integer of 15 to 1842, where both a and b correspond to the positions of nucleotide residues shown in SEQ ID NO:160, and where b is greater than or equal to a+14.

[1153] Features of Protein Encoded by Gene No: 151

[1154] The translation product of this gene has been found to have homology to a human DNA mismatch repair protein PMS3 (See Genbank Accession No. R95250).

[1155] In specific embodiments, polypeptides of the invention comprise, or alternatively consists of, an amino acid sequence selected from the group: FCHDCKFPEASPAMNCEP (SEQ ID NO:1052), FCHDCKFPEASPAMNCEP (SEQ ID NO:1053), and/or HEPYAVLVI (SEQ ID NO:1054). Moreover, fragments and variants of these polypeptides (such as, for example, fragments as described herein, polypeptides at least 80%, 85%, 90%, 95%, 96%, 97%, 98%, or 99% identical to these polypeptides and polypeptides encoded by the polynucleotide which hybridizes, under stringent conditions, to the polynucleotide encoding these polypeptides) are encompassed by the invention. Antibodies that bind polypeptides of the invention are also encompassed by the invention. Polynucleotides encoding these polypeptides are also encompassed by the invention.

[1156] This gene is expressed primarily in neutrophils.

[1157] Polynucleotides and polypeptides of the invention are useful as reagents for differential identification of the tissue(s) or cell type(s) present in a biological sample and for diagnosis of diseases and conditions which include, but are not limited to, immune or hematopoietic disorders, such as lymphoma, immunodeficiency diseases, and cancers resulting from genetic instability. Similarly, polypeptides and antibodies directed to these polypeptides are useful in providing immunological probes for differential identification of the tissue(s) or cell type(s). For a number of disorders of the above tissues or cells, particularly of the immune system, expression of this gene at significantly higher or lower levels may be routinely detected in certain tissues or cell types (e.g., immune, hematopoietic, and cancerous and wounded tissues) or bodily fluids (e.g., lymph, serum, plasma, urine, synovial fluid and spinal fluid) or another tissue or cell sample taken from an individual having such a disorder, relative to the standard gene expression level, i.e., the expression level in healthy tissue or bodily fluid from an individual not having the disorder.

[1158] Predicted epitopes include those comprising a sequence shown in SEQ ID NO:399 as residues: Met-1 to Lys-6.

[1159] The tissue distribution in neutrophils, combined with the sequence homology to a human mismatch DNA repair enzyme indicates that the protein product of this gene is useful for diagnosis of Hodgkin's lymphoma, since the elevated expression and secretion by the tumor mass may be indicative of tumors of this type. Additionally the gene product may be used as a target in the immunotherapy of the cancer. Because the gene is expressed in cells of lymphoid origin, the natural gene product may be involved in immune functions. Therefore it may be also used as an agent for immunological disorders including arthritis, asthma, immune deficiency diseases such as AIDS, and leukemia. Furthermore, its homology to a known DNA repair protein would suggest the gene may be useful in establishing cancer predisposition and prevention or be of use in gene therapy applications. Protein, as well as, antibodies directed against the protein may show utility as a tumor marker and/or immunotherapy targets for the above listed tissues.

[1160] Many polynucleotide sequences, such as EST sequences, are publicly available and accessible through sequence databases. Some of these sequences are related to SEQ ID NO:161 and may have been publicly available prior to conception of the present invention. Preferably, such related polynucleotides are specifically excluded from the scope of the present invention. To list every related sequence is cumbersome. Accordingly, preferably excluded from the present invention are one or more polynucleotides comprising a nucleotide sequence described by the general formula of a-b, where a is any integer between 1 to 756 of SEQ ID NO:161, b is an integer of 15 to 770, where both a and b correspond to the positions of nucleotide residues shown in SEQ ID NO:161, and where b is greater than or equal to a+14.

[1161] Features of Protein Encoded by Gene No: 152

[1162] In specific embodiments, polypeptides of the invention comprise, or alternatively consists of, the following amino acid sequence: PQPSNFPTTVRNLPYSGAGAQPPPSNC (SEQ ID NO:1055). Moreover, fragments and variants of this polypeptide (such as, for example, fragments as described herein, polypeptides at least 80%, 85%, 90%, 95%, 96%, 97%, 98%, or 99% identical to these polypeptides and polypeptides encoded by the polynucleotide which hybridize, under stringent conditions, to the polynucleotide encoding this polypeptide are encompassed by the invention. Antibodies that bind polypeptides of the invention are also encompassed by the invention. Polynucleotides encoding this polypeptide are also encompassed by the invention.

[1163] This gene is expressed primarily in neutrophils.

[1164] Polynucleotides and polypeptides of the invention are useful as reagents for differential identification of the tissue(s) or cell type(s) present in a biological sample and for diagnosis of diseases and conditions which include, but are not limited to, immune or hematopoietic disorders, such as infectious diseases and lymphoma. Similarly, polypeptides and antibodies directed to these polypeptides are useful in providing immunological probes for differential identification of the tissue(s) or cell type(s). For a number of disorders of the above tissues or cells, particularly of the immune system, expression of this gene at significantly higher or lower levels may be routinely detected in certain tissues or cell types (e.g., immune, hematopoietic, and cancerous and wounded tissues) or bodily fluids (e.g., lymph, serum, plasma, urine, synovial fluid and spinal fluid) or another tissue or cell sample taken from an individual having such a disorder, relative to the standard gene expression level, i.e., the expression level in healthy tissue or bodily fluid from an individual not having the disorder.

[1165] The tissue distribution in neutrophils indicates that the protein product of this gene is useful for the treatment of inflammation and infectious diseases. Expression of this gene product in neutrophils indicates a role in regulating the proliferation; survival; differentiation; and/or activation of hematopoietic cell lineages, including blood stem cells. This gene product may be involved in the regulation of cytokine production, antigen presentation, or other processes that may also suggest a usefulness in the treatment of cancer (e.g. by boosting immune responses). Since the gene is expressed in cells of lymphoid origin, the natural gene product may be involved in immune functions. Therefore it may be also used as an agent for immunological disorders including arthritis, asthma, immunodeficiency diseases such as AIDS, leukemia, rheumatoid arthritis, granulomatous disease, inflammatory bowel disease, sepsis, acne, neutropenia, neutrophilia, psoriasis, hypersensitivities, such as T-cell mediated cytotoxicity; immune reactions to transplanted organs and tissues, such as host-versus-graft and graft-versus-host diseases, or autoimmunity disorders, such as autoimmune infertility, lens tissue injury, demyelination, systemic lupus erythematosis, drug induced hemolytic anemia, rheumatoid arthritis, Sjogren's disease, scleroderma and tissues. In addition, this gene product may have commercial utility in the expansion of stem cells and committed progenitors of various blood lineages, and in the differentiation and/or proliferation of various cell types. Protein, as well as, antibodies directed against the protein may show utility as a tumor marker and/or immunotherapy targets for the above listed tissues.

[1166] Many polynucleotide sequences, such as EST sequences, are publicly available and accessible through sequence databases. Some of these sequences are related to SEQ ID NO:162 and may have been publicly available prior to conception of the present invention. Preferably, such related polynucleotides are specifically excluded from the scope of the present invention. To list every related sequence is cumbersome. Accordingly, preferably excluded from the present invention are one or more polynucleotides comprising a nucleotide sequence described by the general formula of a-b, where a is any integer between 1 to 505 of SEQ ID NO:162, b is an integer of 15 to 519, where both a and b correspond to the positions of nucleotide residues shown in SEQ ID NO:162, and where b is greater than or equal to a+14.

[1167] Features of Protein Encoded by Gene No: 153

[1168] In specific embodiments, polypeptides of the invention comprise, or alternatively consists of, an amino acid sequence selected from the group: MASSVPAGGHTRAGGIFLIGKLDLEASLFKSFQWLPFVLRKKCNFFCWDSSA HSLPLHPLSASCSAPACHASDTHLLYPSTRALCPSIFAWLVAPHSVFRTNAPGP TPSSQSSPVFPVFPVSFMALIVCXLVCC (SEQ ID NO:1056), MASSVPAGGHTRAGGIFLIGKLDLEASLFKSFQWLPFVLRKKCNFFCWDSSA HSLPLHPLSASCSAPACHA (SEQ ID NO:1057), FAWLVAPHSVFRTNAPGPTPSSQSSPVFPVFPVSFMALIVCXLVCC (SEQ ID NO:1058), MASSVPAGGHTRAGGIFLIGKLDLEASLFKSFQWLPFVLRKKCNFFCWDSSA HSLPLHPLSASCSAPACHASDTHLLYPSTRALCPSIFAWLVAPHSVFRTNAPGP TPSSQSSPVFPVFPVSFMALIVCXLVCC (SEQ ID NO:1059), LVNWILKLHCLNLFSGFPLYLEKNATSSAGTHPLTAFPSTLSLPHALPLPAMPP ILTFCTPAPVPSAPRSLPGWLLLTQCSGQMLLALPHLASLARSSLSSLFHSWLL LFVXLCAVDF (SEQ ID NO:1060), NLFSGFPLYLEKNATSSAGTHPL (SEQ ID NO:1061), and/or PHLASLARSSLSSLFHSWLLL (SEQ ID NO:1062). Moreover, fragments and variants of these polypeptides (such as, for example, fragments as described herein, polypeptides at least 80%, 85%, 90%, 95%, 96%, 97%, 98%, or 99% identical to these polypeptides and polypeptides encoded by the polynucleotide which hybridizes, under stringent conditions, to the polynucleotide encoding these polypeptides) are encompassed by the invention. Antibodies that bind polypeptides of the invention are also encompassed by the invention. Polynucleotides encoding these polypeptides are also encompassed by the invention.

[1169] This gene is expressed primarily in neutrophils.

[1170] Polynucleotides and polypeptides of the invention are useful as reagents for differential identification of the tissue(s) or cell type(s) present in a biological sample and for diagnosis of diseases and conditions which include, but are not limited to, immune or hematopoietic disorders, such as inflammation and infectious diseases. Similarly, polypeptides and antibodies directed to these polypeptides are useful in providing immunological probes for differential identification of the tissue(s) or cell type(s). For a number of disorders of the above tissues or cells, particularly of the immune system, expression of this gene at significantly higher or lower levels may be routinely detected in certain tissues or cell types (e.g., immune, hematopoietic, and cancerous and wounded tissues) or bodily fluids (e.g., lymph, serum, plasma, urine, synovial fluid and spinal fluid) or another tissue or cell sample taken from an individual having such a disorder, relative to the standard gene expression level, i.e., the expression level in healthy tissue or bodily fluid from an individual not having the disorder.

[1171] Predicted epitopes include those comprising a sequence shown in SEQ ID NO:401 as residues: Ser-11 to Pro-17.

[1172] The tissue distribution in neutrophils indicates that the protein product of this gene is useful for the treatment of infectious diseases and inflammation. Moreover, the expression of this gene product indicates a role in regulating the proliferation; survival; differentiation; and/or activation of hematopoietic cell lineages, including blood stem cells. This gene product may be involved in the regulation of cytokine production, antigen presentation, or other processes that may also suggest a usefulness in the treatment of cancer (e.g. by boosting immune responses). Since the gene is expressed in cells of lymphoid origin, the natural gene product may be involved in immune functions. Therefore it may be also used as an agent for immunological disorders including arthritis, asthma, immunodeficiency diseases such as AIDS, leukemia, rheumatoid arthritis, granulomatous disease, inflammatory bowel disease, sepsis, acne, neutropenia, neutrophilia, psoriasis, hypersensitivities, such as T-cell mediated cytotoxicity; immune reactions to transplanted organs and tissues, such as host-versus-graft and graft-versus-host diseases, or autoimmunity disorders, such as autoimmune infertility, lens tissue injury, demyelination, systemic lupus erythematosis, drug induced hemolytic anemia, rheumatoid arthritis, Sjogren's disease, scleroderma and tissues. In addition, this gene product may have commercial utility in the expansion of stem cells and committed progenitors of various blood lineages, and in the differentiation and/or proliferation of various cell types. Protein, as well as, antibodies directed against the protein may show utility as a tumor marker and/or immunotherapy targets for the above listed tissues.

[1173] Many polynucleotide sequences, such as EST sequences, are publicly available and accessible through sequence databases. Some of these sequences are related to SEQ ID NO:163 and may have been publicly available prior to conception of the present invention. Preferably, such related polynucleotides are specifically excluded from the scope of the present invention. To list every related sequence is cumbersome. Accordingly, preferably excluded from the present invention are one or more polynucleotides comprising a nucleotide sequence described by the general formula of a-b, where a is any integer between 1 to 739 of SEQ ID NO:163, b is an integer of 15 to 753, where both a and b correspond to the positions of nucleotide residues shown in SEQ ID NO:163, and where b is greater than or equal to a+14.

[1174] Features of Protein Encoded by Gene No: 154

[1175] This gene is primarily expressed in ovary, uterus, adipose tissue, brain, and the liver.

[1176] Polynucleotides and polypeptides of the invention are useful as reagents for differential identification of the tissue(s) or cell type(s) present in a biological sample and for diagnosis of diseases and conditions which include, but are not limited to, reproductive, neural, hepatic, and metabolic disorders. Similarly, polypeptides and antibodies directed to these polypeptides are useful in providing immunological probes for differential identification of the tissue(s) or cell type(s). For a number of disorders of the above tissues or cells, particularly of the female reproductive system, expression of this gene at significantly higher or lower levels may be routinely detected in certain tissues or cell types (e.g., ovary, uterus, adipose tissue, brain, liver, and cancerous and wounded tissues) or bodily fluids (e.g., lymph, bile, amniotic fluid, serum, plasma, urine, synovial fluid and spinal fluid) or another tissue or cell sample taken from an individual having such a disorder, relative to the standard gene expression level, i.e., the expression level in healthy tissue or bodily fluid from an individual not having the disorder.

[1177] Predicted epitopes include those comprising a sequence shown in SEQ ID NO:402 as residues: Asn-56 to Gly-67.

[1178] The tissue distribution of this gene product in ovary and uterus indicates that the protein product of this gene is useful for diagnostic or therapeutic uses in the treatment of the female reproductive system, obesity, and Liver disorders, particularly cancer in the above tissues. Protein, as well as, antibodies directed against the protein may show utility as a tumor marker and/or immunotherapy targets for the above listed tissues.

[1179] Many polynucleotide sequences, such as EST sequences, are publicly available and accessible through sequence databases. Some of these sequences are related to SEQ ID NO:164 and may have been publicly available prior to conception of the present invention. Preferably, such related polynucleotides are specifically excluded from the scope of the present invention. To list every related sequence is cumbersome. Accordingly, preferably excluded from the present invention are one or more polynucleotides comprising a nucleotide sequence described by the general formula of a-b, where a is any integer between 1 to 1879 of SEQ ID NO:164, b is an integer of 15 to 1893, where both a and b correspond to the positions of nucleotide residues shown in SEQ ID NO:164, and where b is greater than or equal to a+14.

[1180] Features of Protein Encoded by Gene No: 155

[1181] The gene encoding the disclosed cDNA is believed to reside on chromosome 3. Accordingly, polynucleotides related to this invention are useful as a marker in linkage analysis for chromosome 3.

[1182] This gene is expressed in multiple tissues including brain, aortic endothelial cells, smooth muscle, pituitary, testis, melanocytes, spleen, neutrophils, and placenta.

[1183] Polynucleotides and polypeptides of the invention are useful as reagents for differential identification of the tissue(s) or cell type(s) present in a biological sample and for diagnosis of diseases and conditions which include, but are not limited to, immunological or vascular disorders, including immunodeficiencies, cancers of the brain and the female reproductive system, as well as cardiovascular disorders, such as atherosclerosis and stroke. Similarly, polypeptides and antibodies directed to these polypeptides are useful in providing immunological probes for differential identification of the tissue(s) or cell type(s). For a number of disorders of the above tissues or cells, particularly of the central nervous and immune systems, expression of this gene at significantly higher or lower levels may be routinely detected in certain tissues or cell types (e.g., immune, vascular, endothelial, neural, hematopoietic, reproductive, integumentary, placental, endocrine, and cancerous and wounded tissues) or bodily fluids (e.g., lymph, amniotic fluid, serum, plasma, urine, synovial fluid and spinal fluid) or another tissue or cell sample taken from an individual having such a disorder, relative to the standard gene expression level, i.e., the expression level in healthy tissue or bodily fluid from an individual not having the disorder.

[1184] The tissue distribution in neural tissue indicates that the protein product of this gene is useful in the treatment/detection of disorders in the nervous system, including schizophrenia, neurodegeneration, neoplasia, brain cancer as well as vascular and female reproductive disorders, including cancer within the above tissues. Moreover, the protein product of this gene may also be useful in the treatment and/or detection of other vascular disorders which include, but are not limited to, aneurysms, emboli, thrombosis, atherosclerosis, microvascular disease, or stroke. Protein, as well as, antibodies directed against the protein may show utility as a tumor marker and/or immunotherapy targets for the above listed tissues.

[1185] Many polynucleotide sequences, such as EST sequences, are publicly available and accessible through sequence databases. Some of these sequences are related to SEQ ID NO:165 and may have been publicly available prior to conception of the present invention. Preferably, such related polynucleotides are specifically excluded from the scope of the present invention. To list every related sequence is cumbersome. Accordingly, preferably excluded from the present invention are one or more polynucleotides comprising a nucleotide sequence described by the general formula of a-b, where a is any integer between 1 to 2139 of SEQ ID NO:165, b is an integer of 15 to 2153, where both a and b correspond to the positions of nucleotide residues shown in SEQ ID NO:165, and where b is greater than or equal to a+14.

[1186] Features of Protein Encoded by Gene No: 156

[1187] The translation product of this gene shares sequence homology with the human gene encoding cytochrome b561 (See Genbank Accession No. P10897). Cytochrome b561 is a transmembrane electron transport protein that is specific to a subset of secretory vesicles containing catecholamines and amidated peptides. This protein is thought to supply reducing equivalents to the intravesicular enzymes dopamine-beta-hydroxylase and alpha-peptide amidase.

[1188] In specific embodiments, polypeptides of the invention comprise, or alternatively consists of, an amino acid sequence selected from the group: MAMEGYWRFLALLGSALLVGFLSVIFALVWVLHYREGLGWDGSALEFNWH PVLMVTGFVFIQGIAIIVYRLPWTWKCSKLLMKSIHAGLNAVAAILAIISVVAV FENHNVNNIANMYSLHSWVGLIAVICYLLQLLSGFSVFLLPWAPLSLRAFLMP IHVYSGIVIFGTVIATALMGLTEKLIFSLRDPAYSTFPPEGVFVNTLGLLILVFG ALIFWIVTRPQWKRPKEPNSTILHPNGGTEQGARGSMPAYSGNNMDKSDSEL NSEVAARKRNLALDEAGQRSTM (SEQ ID NO:1063), AHASAHASGGAEYGAL (SEQ ID NO:1064), QYSQYVQSAQLGWTDSCHMLFVTASFRFFSLSASMGSAFSPSISHAHTCLFW NCHLWNSDCNSTYGIDRETDFFPERSCIQYIPARRCFRKYAWPSDPGVRGPHF LDSHQTAMETS (SEQ ID NO:1065), ASMGS AFSPSISHAHTCLFWNCHLWNSDCNSTYG (SEQ ID NO:1066), FVHVVARVGWHGTSCSLFSASIWMKNGRIWLLRTFPLRSGDYPKNEGPEHQ DQKAKRIYENTFWRECTVCRISQGKNQFLCQSHKCCCNHCSKDDNSRINMY GHEKCSERKRSPWKQKD (SEQ ID NO:1067), and/or ASIWMKNGRIWLLRTFPLRSGDYPKNEGPEHQ (SEQ ID NO:1068). Moreover, fragments and variants of these polypeptides (such as, for example, fragments as described herein, polypeptides at least 80%, 85%, 90%, 95%, 96%, 97%, 98%, or 99% identical to these polypeptides and polypeptides encoded by the polynucleotide which hybridizes, under stringent conditions, to the polynucleotide encoding these polypeptides) are encompassed by the invention. Antibodies that bind polypeptides of the invention are also encompassed by the invention. Polynucleotides encoding these polypeptides are also encompassed by the invention.

[1189] The gene encoding the disclosed cDNA is believed to reside on chromosome 2. Accordingly, polynucleotides related to this invention are useful as a marker in linkage analysis for chromosome 2.

[1190] This gene is expressed primarily in anergic T-cells.

[1191] Polynucleotides and polypeptides of the invention are useful as reagents for differential identification of the tissue(s) or cell type(s) present in a biological sample and for diagnosis of diseases and conditions which include, but are not limited to, immune or hematopoietic disorders, and metabolic related diseases. Similarly, polypeptides and antibodies directed to these polypeptides are useful in providing immunological probes for differential identification of the tissue(s) or cell type(s). For a number of disorders of the above tissues or cells, particularly of the immune system, expression of this gene at significantly higher or lower levels may be routinely detected in certain tissues or cell types (e.g., immune, hematopoietic, metabolic, and cancerous and wounded tissues) or bodily fluids (e.g., lymph, serum, plasma, urine, synovial fluid and spinal fluid) or another tissue or cell sample taken from an individual having such a disorder, relative to the standard gene expression level, i.e., the expression level in healthy tissue or bodily fluid from an individual not having the disorder.

[1192] Predicted epitopes include those comprising a sequence shown in SEQ ID NO:404 as residues: Pro-222 to Asn-231, Asn-238 to Gly-247, Ala-251 to Leu-264, Ala-280 to Thr-285.

[1193] The tissue distribution in anergic T-cells indicates that the protein product or mRNA of this gene is useful for the treatment or diagnosis of immune system and metabolic diseases or conditions including Tay-Sachs disease, phenylketonuria, galactosemia, various porphyrias, and Hurler's syndrome. Protein, as well as, antibodies directed against the protein may show utility as a tumor marker and/or immunotherapy targets for the above listed tissues.

[1194] Many polynucleotide sequences, such as EST sequences, are publicly available and accessible through sequence databases. Some of these sequences are related to SEQ ID NO:166 and may have been publicly available prior to conception of the present invention. Preferably, such related polynucleotides are specifically excluded from the scope of the present invention. To list every related sequence is cumbersome. Accordingly, preferably excluded from the present invention are one or more polynucleotides comprising a nucleotide sequence described by the general formula of a-b, where a is any integer between 1 to 1237 of SEQ ID NO:166, b is an integer of 15 to 1251, where both a and b correspond to the positions of nucleotide residues shown in SEQ ID NO:166, and where b is greater than or equal to a+14.

[1195] Features of Protein Encoded by Gene No: 157

[1196] The translation product of this gene shares sequence homology with collagen which is important in mammalian development. This gene also shows sequence homology with bcl-2 and the HNK-1 sulfotransferase of Rattus norvegicus which is thought be involved in carbohydrate biosynthesis. (See Genbank Accession No. P80988 and AF022729, respectively.) When tested against Jurkat cell lines, supernatants removed from cells containing this gene activated the GAS (gamma activating sequence) promoter element. Thus, it is likely that this gene activates T-cells cells through the JAK-STAT signal transduction pathway. GAS is a promoter element found upstream of many genes which are involved in the Jak-STAT pathway. The Jak-STAT pathway is a large, signal transduction pathway involved in the differentiation and proliferation of cells. Therefore, activation of the Jak-STAT pathway, reflected by the binding of the GAS element, can be used to indicate proteins involved in the proliferation and differentiation of cells.

[1197] In specific embodiments, polypeptides of the invention comprise, or alternatively consists of, the following amino acid sequence: [sequence omitted] (SEQ ID NO:1069). Moreover, fragments and variants of this polypeptide (such as, for example, fragments as described herein, polypeptides at least 80%, 85%, 90%, 95%, 96%, 97%, 98%, or 99% identical to these polypeptides and polypeptides encoded by the polynucleotide which hybridize, under stringent conditions, to the polynucleotide encoding this polypeptide are encompassed by the invention. Antibodies that bind polypeptides of the invention are also encompassed by the invention. Polynucleotides encoding this polypeptide are also encompassed by the invention.

[1198] This gene is expressed primarily in HL-60 tissue culture cells, and to a lesser extent, in liver, breast, and uterus.

[1199] Polynucleotides and polypeptides of the invention are useful as reagents for differential identification of the tissue(s) or cell type(s) present in a biological sample and for diagnosis of diseases and conditions which include, but are not limited to, immunological diseases, hereditary disorders involving the MHC class of immune molecules, as well as developmental disorders and reproductive disorders. Similarly, polypeptides and antibodies directed to these polypeptides, are useful in providing immunological probes for differential identification of the tissue(s) or cell type(s). For a number of disorders of the above tissues or cells, particularly of the immune and reproductive system expression of this gene at significantly higher or lower levels may be routinely detected in certain tissues or cell types (e.g., reproductive, hepatic, immune, hematopoietic, and cancerous and wounded tissues) or bodily fluids (e.g., lymph, serum, plasma, urine, synovial fluid and spinal fluid) or another tissue or cell sample taken from an individual having such a disorder, relative to the standard gene expression level, i.e., the expression level in healthy tissue or bodily fluid from an individual not having the disorder.

[1200] Predicted epitopes include those comprising a sequence shown in SEQ ID NO:405 as residues: Ser-39 to Gly-46, Leu-49 to Ala-62.

[1201] The tissue distribution in reproductive, and immune tissues, combined with the homology to collagen and the detected GAS biological activity indicates that the protein product of this gene is useful for diagnosis and treatment of hereditary MHC disorders and particularly autoimmune disorders including rheumatoid arthritis, lupus, scleroderma, and dermatomyositis, as well as many reproductive disorders, including cancer of the uterus, and breast tissues. Protein, as well as, antibodies directed against the protein may show utility as a tumor marker and/or immunotherapy targets for the above listed tissues.

[1202] Many polynucleotide sequences, such as EST sequences, are publicly available and accessible through sequence databases. Some of these sequences are related to SEQ ID NO:167 and may have been publicly available prior to conception of the present invention. Preferably, such related polynucleotides are specifically excluded from the scope of the present invention. To list every related sequence is cumbersome. Accordingly, preferably excluded from the present invention are one or more polynucleotides comprising a nucleotide sequence described by the general formula of a-b, where a is any integer between 1 to 868 of SEQ ID NO:167, b is an integer of 15 to 882, where both a and b correspond to the positions of nucleotide residues shown in SEQ ID NO:167, and where b is greater than or equal to a+14.

[1203] Features of Protein Encoded by Gene No: 158

[1204] This gene is expressed primarily in the amygdala region of the brain.

[1205] Polynucleotides and polypeptides of the invention are useful as reagents for differential identification of the tissue(s) or cell type(s) present in a biological sample and for diagnosis of diseases and conditions which include, but are not limited to, a variety of brain disorders, particularly those effecting mood and personality, in addition to neurodegenerative conditions. Similarly, polypeptides and antibodies directed to these polypeptides are useful in providing immunological probes for differential identification of the tissue(s) or cell type(s). For a number of disorders of the above tissues or cells, particularly of the brain and central nervous system, expression of this gene at significantly higher or lower levels may be routinely detected in certain tissues or cell types (e.g., neural, and cancerous and wounded tissues) or bodily fluids (e.g., lymph, serum, plasma, urine, synovial fluid and spinal fluid) or another tissue or cell sample taken from an individual having such a disorder, relative to the standard gene expression level, i.e., the expression level in healthy tissue or bodily fluid from an individual not having the disorder.

[1206] The tissue distribution in the amygdala indicates that the protein product of this gene is useful for the treatment and/or diagnosis of a variety of brain disorders, particularly bi-polar disorder, uni-polar depression, and dementia. Moreover, The tissue distribution indicates that the protein product of this gene is useful for the detection/treatment of neurodegenerative disease states, behavioral disorders, or inflammatory conditions which include, but are not limited to Alzheimer's Disease, Parkinson's Disease, Huntington's Disease, Tourette's Syndrome, meningitis, encephalitis, demyelinating diseases, peripheral neuropathies, neoplasia, trauma, congenital malformations, spinal cord injuries, ischemia and infarction, aneurysms, hemorrhages, schizophrenia, mania, dementia, paranoia, obsessive compulsive disorder, panic disorder, learning disabilities, ALS, psychoses, autism, and altered behaviors, including disorders in feeding, sleep patterns, balance, and perception. In addition, elevated expression of this gene product in regions of the brain indicates that it plays a role in normal neural function. Potentially, this gene product is involved in synapse formation, neurotransmission, learning, cognition, homeostasis, or neuronal differentiation or survival. Moreover, the gene or gene product may also play a role in the treatment and/or detection of developmental disorders associated with the developing embryo, sexually-linked disorders, or disorders of the cardiovascular system. Protein, as well as, antibodies directed against the protein may show utility as a tumor marker and/or immunotherapy targets for the above listed tissues.

[1207] Many polynucleotide sequences, such as EST sequences, are publicly available and accessible through sequence databases. Some of these sequences are related to SEQ ID NO:168 and may have been publicly available prior to conception of the present invention. Preferably, such related polynucleotides are specifically excluded from the scope of the present invention. To list every related sequence is cumbersome. Accordingly, preferably excluded from the present invention are one or more polynucleotides comprising a nucleotide sequence described by the general formula of a-b, where a is any integer between 1 to 1194 of SEQ ID NO:168, b is an integer of 15 to 1208, where both a and b correspond to the positions of nucleotide residues shown in SEQ ID NO:168, and where b is greater than or equal to a+14.

[1208] Features of Protein Encoded by Gene No: 159

[1209] This gene is expressed in a variety of tissues and cell types including brain, smooth muscle, kidney, salivary gland, and T-cells.

[1210] Polynucleotides and polypeptides of the invention are useful as reagents for differential identification of the tissue(s) or cell type(s) present in a biological sample and for diagnosis of diseases and conditions which include, but are not limited to, neural, renal, vascular, metabolic, or immune disorders, particularly cancers. Similarly, polypeptides and antibodies directed to these polypeptides are useful in providing immunological probes for differential identification of the tissue(s) or cell type(s). For a number of disorders of the above tissues or cells, particularly of the central nervous, urinary, salivary, digestive, and immune systems, expression of this gene at significantly higher or lower levels may be routinely detected in certain tissues or cell types (e.g., neural, renal, vascular, metabolic, immune cancerous and wounded tissues) or bodily fluids (e.g., lymph, serum, plasma, urine, synovial fluid and spinal fluid) or another tissue or cell sample taken from an individual having such a disorder, relative to the standard gene expression level, i.e., the expression level in healthy tissue or bodily fluid from an individual not having the disorder.

[1211] Predicted epitopes include those comprising a sequence shown in SEQ ID NO:407 as residues: Asp-43 to Asp-60.

[1212] The tissue distribution in brain, smooth muscle, and T-cells indicates that the protein product of this gene is useful for diagnosis of various neurological, and cardiovascular disorders, but not limited to cancer within the above tissues. Additionally the gene product may be used as a target in the immunotherapy of the cancer. Because the gene is expressed in cells of lymphoid origin, the natural gene product may be involved in immune functions. Therefore it may be also used as an agent for immunological disorders including arthritis, asthma, immune deficiency diseases such as AIDS, and leukemia. Protein, as well as, antibodies directed against the protein may show utility as a tumor marker and/or immunotherapy targets for the above listed tissues.

[1213] Many polynucleotide sequences, such as EST sequences, are publicly available and accessible through sequence databases. Some of these sequences are related to SEQ ID NO:169 and may have been publicly available prior to conception of the present invention. Preferably, such related polynucleotides are specifically excluded from the scope of the present invention. To list every related sequence is cumbersome. Accordingly, preferably excluded from the present invention are one or more polynucleotides comprising a nucleotide sequence described by the general formula of a-b, where a is any integer between 1 to 1244 of SEQ ID NO:169, b is an integer of 15 to 1258, where both a and b correspond to the positions of nucleotide residues shown in SEQ ID NO:169, and where b is greater than or equal to a+14.

[1214] Features of Protein Encoded by Gene No: 160

[1215] The translation product of this gene shares sequence homology with collagen, which is thought to be important in cellular interactions, extracellular matrix formation, and has been found to be an identifying determinant in autoimmune disorders. Moreover, this gene shows sequence homology with the yeast protein, S1s1p, an endoplasmic reticulum component involved in the protein translocation process in the Yeast Yarrowia lipolytica. (See Genbank Accession No. 1052828; see also J. Biol. Chem. 271, 11668-11675 (1996).) In Mus musculus, this same region shows sequence homology with the heavy chain of kinesin. (See Genbank Accession No. 2062607.) Recently, suppression of the heavy chain of kinesin was shown to inhibit insulin secretion from primary cultures of mouse beta-cells. (See Endocrinology 138 (5), 1979-1987 (1997).) Moreover, kinesin was found associated with drug resistance and cell immortalization. (See Genbank Accession No. 468355.) Thus, it is likely that this gene also acts as a genetic suppressor element. In specific embodiments, polypeptides of the invention comprise, or alternatively consists of, an amino acid sequence selected from the group: [sequence omitted] (SEQ ID NO:1070), NGQASTAKMSSCLRSPPTLAPLSLTSGIPVQSWCGASSQLLQQAVDRAQQLL EVALVLTILQLQAGQHLVLSLQAGQCPAELGVLTVAVPAGGQEDAQCLQHL LTGIMLGQRQEVGRDLAPALFPQAWQEVYLAILLQLLWGHLLGQLSLLLGEH LLRDQVVEQCDHAHGEHLRALLLHQGPQDLQPPELQELPLGIGEVAQQGAQ CKQDLLLCSERLLRGQDDQQLLQGSPFDGLHLDLGVAGKGSAQHKRSILLHE GLCAVQPIDHHLKTTKGKQVLRIVHLMDIIFKIKERSNLLFQTGAGTIELVDQP YHDLHVSLNDNIQLIKVFLQFLNGAEEPLYLSLPCLVFL (SEQ ID NO:1071), QHLVLSLQAGQCPAELGVLTVAVPAGGQEDAQC (SEQ ID NO:1072), QLSLLLGEHLLRDQVVEQCDHAHGEH (SEQ ID NO:1073), GS PFDGLHLDLGVAGKGSAQHKRSILLHEGLC (SEQ ID NO:1074), and/or HLMDII FKIKERSNLLFQTGAGTIELVDQP (SEQ ID NO:1075). Moreover, fragments and variants of these polypeptides (such as, for example, fragments as described herein, polypeptides at least 80%, 85%, 90%, 95%, 96%, 97%, 98%, or 99% identical to these polypeptides and polypeptides encoded by the polynucleotide which hybridizes, under stringent conditions, to the polynucleotide encoding these polypeptides) are encompassed by the invention. Antibodies that bind polypeptides of the invention are also encompassed by the invention. Polynucleotides encoding these polypeptides are also encompassed by the invention.

[1216] The gene encoding the disclosed cDNA is believed to reside on chromosome 5. Accordingly, polynucleotides related to this invention are useful as a marker in linkage analysis for chromosome 5.

[1217] This gene is expressed primarily in the greater omentum, and to a lesser extent in gall bladder, stromal bone marrow cells, lymph node, liver, testes, pituitary, and thymus.

[1218] Polynucleotides and polypeptides of the invention are useful as reagents for differential identification of the tissue(s) or cell type(s) present in a biological sample and for diagnosis of diseases and conditions which include, but are not limited to, disorders of the endocrine, gastrointestinal, and immunological systems, including autoimmune disorders and cancers. Similarly, polypeptides and antibodies directed to these polypeptides are useful in providing immunological probes for differential identification of the tissue(s) or cell type(s). For a number of disorders of the above tissues or cells, particularly of the immune and gastrointestinal systems, expression of this gene at significantly higher or lower levels may be routinely detected in certain tissues or cell types (e.g., gastrointestinal, metabolic, immune, hematopoietic, hepatic, reproductive, endocrine, and cancerous and wounded tissues) or bodily fluids (e.g., lymph, bile, serum, plasma, urine, synovial fluid and spinal fluid) or another tissue or cell sample taken from an individual having such a disorder, relative to the standard gene expression level, i.e., the expression level in healthy tissue or bodily fluid from an individual not having the disorder.

[1219] Predicted epitopes include those comprising a sequence shown in SEQ ID NO:408 as residues: Asn-27 to Leu-47, Gln-81 to Lys-88, Asp-93 to Lys-102, Asn-107 to Leu-116, Met-129 to Glu-141, Glu-150 to Asp-157, Lys-176 to Glu-185, Glu-333 to Tyr-349, Cys-393 to Leu-403, Gln-423 to Gly-429.

[1220] The tissue distribution within gastrointestinal, endocrine and immunological tissues, combined with the sequence homology to a conserved collagen motif, indicates that the protein product of this gene is useful for the diagnosis of various autoimmune disorders including, but not limited to, rheumatoid arthritis, lupus erythromatosus, scleroderma, and dermatomyositis. Because the gene is expressed in cells of lymphoid origin, the natural gene product may be involved in immune functions. Therefore it may be also used as an agent for immunological disorders including arthritis, asthma, immune deficiency diseases such as AIDS, and leukemia. Protein, as well as, antibodies directed against the protein may show utility as a tumor marker and/or immunotherapy targets for the above listed tissues.

[1221] Many polynucleotide sequences, such as EST sequences, are publicly available and accessible through sequence databases. Some of these sequences are related to SEQ ID NO:170 and may have been publicly available prior to conception of the present invention. Preferably, such related polynucleotides are specifically excluded from the scope of the present invention. To list every related sequence is cumbersome. Accordingly, preferably excluded from the present invention are one or more polynucleotides comprising a nucleotide sequence described by the general formula of a-b, where a is any integer between 1 to 1610 of SEQ ID NO:170, b is an integer of 15 to 1624, where both a and b correspond to the positions of nucleotide residues shown in SEQ ID NO:170, and where b is greater than or equal to a+14.

[1222] Features of Protein Encoded by Gene No: 161

[1223] This gene has homology to the tissue inhibitor of metalloproteinase 2. Such inhibitors are vital to the proper regulation of metalloproteins such as collagenases, which has implications for tissue regeneration and autoimmune disorders (See Genbank Accession No. P16368). When tested against Jarkat cell lines, supernatants removed from cells containing this gene activated the GAS (gamma activating sequence) promoter element. Thus, it is likely that this gene activates T-cells cells through the JAK-STAT signal transduction pathway. GAS is a promoter element found upstream of many genes which are involved in the Jak-STAT pathway. The Jak-STAT pathway is a large, signal transduction pathway involved in the differentiation and proliferation of cells. Therefore, activation of the Jak-STAT pathway, reflected by the binding of the GAS element, can be used to indicate proteins involved in the proliferation and differentiation of cells. In addition, this gene maps to chromosome 17, and therefore, may be used as a marker in linkage analysis for chromosome 17 (See Genbank Accession No. P16368).

[1224] This gene is expressed primarily in several types of cancers including osteoclastoma, chondrosarcoma, and rhabdomyosarcoma, and to a lesser extent, in non-malignant tissues including synovium, amygdala, testes, and placenta.

[1225] Polynucleotides and polypeptides of the invention are useful as reagents for differential identification of the tissue(s) or cell type(s) present in a biological sample and for diagnosis of diseases and conditions which include, but are not limited to, immune or integumentary disorders, particularly cancers of bone and cartilage, as well as various autoimmune disorders. Similarly, polypeptides and antibodies directed to these polypeptides are useful in providing immunological probes for differential identification of the tissue(s) or cell type(s). For a number of disorders of the above tissues or cells, particularly of the musculoskeletal system, expression of this gene at significantly higher or lower levels may be routinely detected in certain tissues or cell types (e.g., skeletal, integumentary, synovium, muscle, fibroids, reproductive, neural, and cancerous and wounded tissues) or bodily fluids (e.g., lymph, serum, plasma, urine, synovial fluid and spinal fluid) or another tissue or cell sample taken from an individual having such a disorder, relative to the standard gene expression level, i.e., the expression level in healthy tissue or bodily fluid from an individual not having the disorder.

[1226] Predicted epitopes include those comprising a sequence shown in SEQ ID NO:409 as residues: Thr-24 to Thr-34.

[1227] The tissue distribution in various cancers, combined with the sequence homology to a collagenase inhibitor and the detected GAS biological activity, indicates that the protein product of this gene is useful for the detection of various autoimmune disorders such as rheumatoid arthritis, lupus, scleroderma, and dermatomyositis. Therefore it may be also used as an agent for immunological disorders including arthritis, asthma, immune deficiency diseases such as AIDS, and leukemia. The expression of this gene product would also suggest a role in the detection and treatment of disorders and conditions afflicting the skeletal system, in particular osteoporosis, bone cancer, as well as, connective tissue disorders (e.g. arthritis, trauma, tendonitis, chrondomalacia and inflammation), such as in the diagnosis or treatment of various autoimmune disorders such as rheumatoid arthritis, lupus, scleroderma, and dermatomyositis as well as dwarfism, spinal deformation, and specific joint abnormalities as well as chondrodysplasias (i.e. spondyloepiphyseal dysplasia congenita, familial osteoarthritis, Atelosteogenesis type II, metaphyseal chondrodysplasia type Schmid). Protein, as well as, antibodies directed against the protein may show utility as a tumor marker and/or immunotherapy targets for the above listed tissues.

[1228] Many polynucleotide sequences, such as EST sequences, are publicly available and accessible through sequence databases. Some of these sequences are related to SEQ ID NO:171 and may have been publicly available prior to conception of the present invention. Preferably, such related polynucleotides are specifically excluded from the scope of the present invention. To list every related sequence is cumbersome. Accordingly, preferably excluded from the present invention are one or more polynucleotides comprising a nucleotide sequence described by the general formula of a-b, where a is any integer between 1 to 1989 of SEQ ID NO:171, b is an integer of 15 to 2003, where both a and b correspond to the positions of nucleotide residues shown in SEQ ID NO:171, and where b is greater than or equal to a+14.

[1229] Features of Protein Encoded by Gene No: 162

[1230] This gene is homologous to the mitochondrial ATP6 gene, and therefore is likely a homolog of this gene family (See Genbank Accession No. X76197).

[1231] This gene is expressed primarily in brain tissue.

[1232] Polynucleotides and polypeptides of the invention are useful as reagents for differential identification of the tissue(s) or cell type(s) present in a biological sample and for diagnosis of diseases and conditions which include, but are not limited to, neural disorders, including, but not limited to, neurodegenerative conditions, Down's syndrome, depression, Schizophrenia, and epilepsy. Similarly, polypeptides and antibodies directed to these polypeptides are useful in providing immunological probes for differential identification of the tissue(s) or cell type(s). For a number of disorders of the above tissues or cells, particularly of the central nervous system, expression of this gene at significantly higher or lower levels may be routinely detected in certain tissues or cell types (e.g., neural, and cancerous and wounded tissues) or bodily fluids (e.g., lymph, serum, plasma, urine, synovial fluid and spinal fluid) or another tissue or cell sample taken from an individual having such a disorder, relative to the standard gene expression level, i.e., the expression level in healthy tissue or bodily fluid from an individual not having the disorder.

[1233] The tissue distribution in brain tissue indicates this gene is useful for diagnosis of various neurological disorders including, but not limited to, brain cancer. Additionally the gene product may be used as a target in the immunotherapy of cancer in the brain as well as for the diagnosis of metabolic disorders such as obesity, Tay-Sachs disease, phenylketonuria and Hurler's Syndrome. Similarly, the protein product of this gene is useful for the detection/treatment of neurodegenerative disease states, behavioral disorders, or inflammatory conditions which include, but are not limited to Alzheimer's Disease, Parkinson's Disease, Huntington's Disease, Tourette's Syndrome, meningitis, encephalitis, demyelinating diseases, peripheral neuropathies, neoplasia, trauma, congenital malformations, spinal cord injuries, ischemia and infarction, aneurysms, hemorrhages, schizophrenia, mania, dementia, paranoia, obsessive compulsive disorder, depression, panic disorder, learning disabilities, ALS, psychoses, autism, and altered behaviors, including disorders in feeding, sleep patterns, balance, and perception. In addition, elevated expression of this gene product in regions of the brain indicates that it plays a role in normal neural function. Potentially, this gene product is involved in synapse formation, neurotransmission, learning, cognition, homeostasis, or neuronal differentiation or survival. Moreover, the gene or gene product may also play a role in the treatment and/or detection of developmental disorders associated with the developing embryo, sexually-linked disorders, or disorders of the cardiovascular system. Protein, as well as, antibodies directed against the protein may show utility as a tumor marker and/or immunotherapy targets for the above listed tissues.

[1234] Many polynucleotide sequences, such as EST sequences, are publicly available and accessible through sequence databases. Some of these sequences are related to SEQ ID NO:172 and may have been publicly available prior to conception of the present invention. Preferably, such related polynucleotides are specifically excluded from the scope of the present invention. To list every related sequence is cumbersome. Accordingly, preferably excluded from the present invention are one or more polynucleotides comprising a nucleotide sequence described by the general formula of a-b, where a is any integer between 1 to 772 of SEQ ID NO:172, b is an integer of 15 to 786, where both a and b correspond to the positions of nucleotide residues shown in SEQ ID NO:172, and where b is greater than or equal to a+14.

[1235] Features of Protein Encoded by Gene No: 163

[1236] The translation product of this gene was found to have homology to the MRS3 and 4 protein of Saccharomyces cerevisiae (See Genbank Accession No. gi|3996), which is known to suppress a splice defect in mitochondrial by possibly serving to modulate the cation-solute concentration in mitochondria.

[1237] In specific embodiments, polypeptides of the invention comprise, or alternatively consist of, the following amino acid sequences: DEPCPPPAASCAPPSWRMELRTGSVGSQAVARRMDGDSRDGGGGKDATGSE DYENLPTSASVSTHMTAGAMAGILEHSVMYPVDSVKTRMQSLSPDPKAQYT SIYGALKKIMRTEASGGPCEASTS (SEQ ID NO:1076), RMELRTGSVGSQAVARRMDGDSRDGGGGKDATGS (SEQ ID NO:1077), and/or PVDSVKTRMQSLSPDPKAQYTSIYGAL (SEQ ID NO:1078). Moreover, fragments and variants of these polypeptides (such as, for example, fragments as described herein, polypeptides at least 80%, 85%, 90%, 95%, 96%, 97%, 98%, or 99% identical to these polypeptides and polypeptides encoded by the polynucleotide which hybridizes, under stringent conditions, to the polynucleotide encoding these polypeptides) are encompassed by the invention. Antibodies that bind polypeptides of the invention are also encompassed by the invention. Polynucleotides encoding these polypeptides are also encompassed by the invention.

[1238] The gene encoding the disclosed cDNA is believed to reside on chromosome 8. Accordingly, polynucleotides related to this invention are useful as a marker in linkage analysis for chromosome 8.

[1239] This gene is expressed primarily in placenta, neutrophils, and microvascular endothelial cells, and to a lesser extent, brain, prostate, spleen, thymus, and bone.

[1240] Polynucleotides and polypeptides of the invention are useful as reagents for differential identification of the tissue(s) or cell type(s) present in a biological sample and for diagnosis of diseases and conditions which include, but are not limited to, immune, vascular, or reproductive disorders. Similarly, polypeptides and antibodies directed to these polypeptides are useful in providing immunological probes for differential identification of the tissue(s) or cell type(s). For a number of disorders of the above tissues or cells, particularly of the immune system, expression of this gene at significantly higher or lower levels may be routinely detected in certain tissues or cell types (e.g., immune, hematopoietic, vascular, endothelial, reproductive, neural, skeletal, and cancerous and wounded tissues) or bodily fluids (e.g., lymph, amniotic fluid, serum, plasma, urine, synovial fluid and spinal fluid) or another tissue or cell sample taken from an individual having such a disorder, relative to the standard gene expression level, i.e., the expression level in healthy tissue or bodily fluid from an individual not having the disorder.

[1241] Features of Protein Encoded by Gene No: 164

[1242] The gene encoding the disclosed cDNA is believed to reside on chromosome 7. Accordingly, polynucleotides related to this invention are useful as a marker in linkage analysis for chromosome 7.

[1243] This gene is expressed primarily in neutrophils, monocytes, bone marrow, and fetal liver.

[1244] Polynucleotides and polypeptides of the invention are useful as reagents for differential identification of the tissue(s) or cell type(s) present in a biological sample and for diagnosis of diseases and conditions which include, but are not limited to, immune system or hematopoietic disorders including, but not limited to, autoimmune disorders such as lupus, leukemia and immunodeficiency disorders. Similarly, polypeptides and antibodies directed to these polypeptides are useful in providing immunological probes for differential identification of the tissue(s) or cell type(s). For a number of disorders of the above tissues or cells, particularly of the immune system, expression of this gene at significantly higher or lower levels may be routinely detected in certain tissues or cell types (e.g., immune, hematopoietic, hepatic, developmental, and cancerous and wounded tissues) or bodily fluids (e.g., lymph, serum, amniotic fluid, plasma, urine, synovial fluid and spinal fluid) or another tissue or cell sample taken from an individual having such a disorder, relative to the standard gene expression level, i.e., the expression level in healthy tissue or bodily fluid from an individual not having the disorder.

[1245] The tissue distribution in various immune system tissues indicates that the protein product of this gene is useful for the diagnosis of various immunological disorders such as Hodgkin's lymphoma, arthritis, asthma, immune deficiency diseases such as AIDS, and leukemia. Moreover, the protein product of this gene is useful for the treatment and diagnosis of hematopoetic related disorders such as anemia, pancytopenia, leukopenia, thrombocytopenia or leukemia since stromal cells are important in the production of cells of hematopoietic lineages. The uses include bone marrow cell ex vivo culture, bone marrow transplantation, bone marrow reconstitution, radiotherapy or chemotherapy of neoplasia. The gene product may also be involved in lymphopoiesis, therefore, it can be used in immune disorders such as infection, inflammation, allergy, immunodeficiency etc. In addition, this gene product may have commercial utility in the expansion of stem cells and committed progenitors of various blood lineages, and in the differentiation and/or proliferation of various cell types. Protein, as well as, antibodies directed against the protein may show utility as a tumor marker and/or immunotherapy targets for the above listed tissues.

[1246] Many polynucleotide sequences, such as EST sequences, are publicly available and accessible through sequence databases. Some of these sequences are related to SEQ ID NO:174 and may have been publicly available prior to conception of the present invention. Preferably, such related polynucleotides are specifically excluded from the scope of the present invention. To list every related sequence is cumbersome. Accordingly, preferably excluded from the present invention are one or more polynucleotides comprising a nucleotide sequence described by the general formula of a-b, where a is any integer between 1 to 1355 of SEQ ID NO:174, b is an integer of 15 to 1369, where both a and b correspond to the positions of nucleotide residues shown in SEQ ID NO:174, and where b is greater than or equal to a+14.

[1247] Features of Protein Encoded by Gene No: 165

[1248] The translation product of this gene shares sequence homology with dystrophin which is thought to be defective in both Duchene and Becker Muscular Dystrophy.

[1249] In specific embodiments, polypeptides of the invention comprise, or alternatively consists of, an amino acid sequence selected from the group: MKLLGECSSSIDSVKRLEHKLKEEEESLPGFVNLHSTETQTAGVIDRWELLQA QALSKELRMKQNLQKWQQFNSDLNSIWAWLGDTEEELEQLQRLELSTDIQTI ELQIKKLKELQKAVDHRKAIILSINLCSPEFTQADSKIESRDLQDRLXQMNGRW DRVCSLLEEWRGLLQDALMQCQGFHEMSHGLLLMLENIDRRKNEIVPIDSNL DAEILQDHHKQLMQIKHELLESQLRVASLQDMSCQLLVNAEGTDCLEAKEK VHVIGNRLKLLLKEVSRHIKELEKLLDVSSSQQDLSSWSSADELDTSGSVSPX SGRSTPNRQKTPRGKCSLSQPGPSVSSPHSRSTKGGSDSSLSEPXPGRSGRGFL FRVLRAALPLQLLLLLLIGLACLVPMSEEDYSCALSNNFARSFHPMLRYTNGP PPL (SEQ ID NO:1079), MKLLGECSSSIDSVKRLEHKLKEEEESLPGFVNLHSTETQTAGVIDRWELLQA QALSKELRMKQNLQKWQQFNSDLNSIWAWLGDTEEELEQLQRLELSTDIQTI ELQIK (SEQ ID NO:1080), KLKELQKAVDHRKAIILSINLCSPEFTQADSKESRDLQDRLXQMNGRWDRVC SLLEEWRGLLQDALMQCQGFHEMSHGLLLMLENIDRRKNEIVPIDSNLDAEIL QDHHKQLMQIKHELLESQLRVASLQDMSCQL (SEQ ID NO:1081), QDMSCQLLVNAEGTDCLEAKEKVHVIGNRLKLLLKEVSRHIKELEKLLDVSS SQQDLSSWSSADELDTSGSVSPXSGRSTPNRQKTPRGKCSLSQPGPSVSSPHS (SEQ ID NO:1082), DSSLSEPXPGRSGRGFLFRVLRAALPLQLLLLLLIGLACLVPMSEEDYSCALSN NFARSFHPMLRYTNGPPPL (SEQ ID NO:1083), QRFLPPGSCXLIRGPQCPRVTDPTTGQSLDDSRFQIQQTENIIRSKTPTGPELDT SYKGY (SEQ ID NO:1084), SISASRLESIGTISFFLLSMFSSIRSKPWLISWKPWHCIRASCSRPRHSSSREHTR SQRPFICXKRSCRSRLSLLSAWVNSGLQRLMERMMALRWSTAFWSSLSFLIW SSMVWMSVLSSRRWSCSNSSSVSPSQAQMLFKSELNCCHFWRFCFILNSLLN AWAWRSSHRSITPAVWVSVLCRLTKPGRLSSSSFSLCSSLFTESILLLHSPSSF M (SEQ ID NO:1085), TAFWSSLSFLIWSSMVWMSVLSSRRWSCSNSSSVS (SEQ ID NO:1086), LLNAWAWRSSHRSITPAVWVSVLCRL (SEQ ID NO:1087), LARHVLQRGYSELGFQQLMLYLHKLFVMVLKYLCIKVR NRDNFIFPSVNVL QHKKQTMAHFMETLALHQGILQQAPPLLQQRAHSVPAPIHLXQAILQVPALL AVSLGELRAAEIDGEDDGFAVVHSFLELLELFDLELDGLDVSAEFQTLELFQL LLRVPQPGPDAVQV (SEQ ID NO:1088), YSELGFQQLMLYLHKLFVMVLKYLCIKV (SEQ ID NO:1089), AMVCFLCWRTLTEGK (SEQ ID NO:1091), and/or VHSFLELLELFDLELDGLDVSAEFQTLEL (SEQ ID NO:1090). Moreover, fragments and variants of these polypeptides (such as, for example, fragments as described herein, polypeptides at least 80%, 85%, 90%, 95%, 96%, 97%, 98%, or 99% identical to these polypeptides and polypeptides encoded by the polynucleotide which hybridizes, under stringent conditions, to the polynucleotide encoding these polypeptides) are encompassed by the invention. Antibodies that bind polypeptides of the invention are also encompassed by the invention. Polynucleotides encoding these polypeptides are also encompassed by the invention.

[1250] This gene maps to chromosome 6, and therefore, may be used as a marker in linkage analysis for chromosome 6 (See Genbank Accession No. N62896).

[1251] This gene is expressed in numerous tissues including the heart, kidney, and brain.

[1252] Polynucleotides and polypeptides of the invention are useful as reagents for differential identification of the tissue(s) or cell type(s) present in a biological sample and for diagnosis of diseases and conditions which include, but are not limited to, musculoskeletal disorders including Muscular Dystrophy and cardiovascular diseases. Similarly, polypeptides and antibodies directed to these polypeptides are useful in providing immunological probes for differential identification of the tissue(s) or cell type(s). For a number of disorders of the above tissues or cells, particularly of the muscle tissues, expression of this gene at significantly higher or lower levels may be routinely detected in certain tissues or cell types (e.g., muscle, heart, and cancerous and wounded tissues) or bodily fluids (e.g., lymph, serum, plasma, urine, synovial fluid and spinal fluid) or another tissue or cell sample taken from an individual having such a disorder, relative to the standard gene expression level, i.e., the expression level in healthy tissue or bodily fluid from an individual not having the disorder.

[1253] The tissue distribution in heart, combined with the homology to the human dystrophin gene indicates that the protein product of this gene is useful for the diagnosis and treatment of Muscular Dystrophy and other muscle disorders, particularly musculodegenerative conditions. Protein, as well as, antibodies directed against the protein may show utility as a tumor marker and/or immunotherapy targets for the above listed tissues.

[1254] Many polynucleotide sequences, such as EST sequences, are publicly available and accessible through sequence databases. Some of these sequences are related to SEQ ID NO:175 and may have been publicly available prior to conception of the present invention. Preferably, such related polynucleotides are specifically excluded from the scope of the present invention. To list every related sequence is cumbersome. Accordingly, preferably excluded from the present invention are one or more polynucleotides comprising a nucleotide sequence described by the general formula of a-b, where a is any integer between 1 to 2365 of SEQ ID NO:175, b is an integer of 15 to 2379, where both a and b correspond to the positions of nucleotide residues shown in SEQ ID NO:175, and where b is greater than or equal to a+14.

[1255] Features of Protein Encoded by Gene No: 166

[1256] In specific embodiments, polypeptides of the invention comprise, or alternatively consist of, the following amino acid sequences: GAGVGTAMPRVPQSAGGAVTWWGVGLSQPSSVQGGARPGTVPGTPGPLPG LSPAPPPQHPPPLPKLFLLCLSXSLPQDFSLLLCLSLDPCPSSTSDL (SEQ ID NO:1092), GTVPGTPGPLPGLSPAPPPQHPPPLPKLFL (SEQ ID NO:1093), APSRCRRSVVQVPYSAFSSCSWTPTALRRGVLLYAGLSTSSASKAQGWHCLG LEYPSGAIMEVRGRGGDRYAQGPSKCWRGCXLVGSGSVTAILCPGWGKAW DSARHPRTPSRLVSCSTASTPPTPAQAVSPLPLXFPAPGLLSSPLPLLGPLPFLY L (SEQ ID NO:1094), TALRRGVLLYAGLSTSSASKAQGWHCLGLEYPSGAIM (SEQ ID NO:1095), AILCPGWGKAWDSARHPRTPSRLVSCSTASTPP (SEQ ID NO:1096), PPVFMASHRPXGMEPGEWRFVLVHIAFXCAWDLVCEHVSVCSQVRGRGRA GVQGEAEEKREVLGQGXREAEEKQLGQGWGVLRRWSRRQAWKGSWGAW HCPRPCPTLDRGWL (SEQ ID NO:1097), and/or HVSVCSQVRGRGRAGVQGEAEEKREVLGQ (SEQ ID NO:1098). Moreover, fragments and variants of these polypeptides (such as, for example, fragments as described herein, polypeptides at least 80%, 85%, 90%, 95%, 96%, 97%, 98%, or 99% identical to these polypeptides and polypeptides encoded by the polynucleotide which hybridizes, under stringent conditions, to the polynucleotide encoding these polypeptides) are encompassed by the invention. Antibodies that bind polypeptides of the invention are also encompassed by the invention. Polynucleotides encoding these polypeptides are also encompassed by the invention.

[1257] This gene is expressed primarily in human cerebellum.

[1258] Polynucleotides and polypeptides of the invention are useful as reagents for differential identification of the tissue(s) or cell type(s) present in a biological sample and for diagnosis of diseases and conditions which include, but are not limited to, diseases of the central nervous system, including Alzheimer's Disease, Parkinson's Disease, ALS, and mental illnesses. Similarly, polypeptides and antibodies directed to these polypeptides are useful in providing immunological probes for differential identification of the tissue(s) or cell type(s). For a number of disorders of the above tissues or cells, particularly of the central nervous system, expression of this gene at significantly higher or lower levels may be routinely detected in certain tissues or cell types (e.g., neural, and cancerous and wounded tissues) or bodily fluids (e.g., lymph, serum, plasma, urine, synovial fluid and spinal fluid) or another tissue or cell sample taken from an individual having such a disorder, relative to the standard gene expression level, i.e., the expression level in healthy tissue or bodily fluid from an individual not having the disorder.

[1259] Predicted epitopes include those comprising a sequence shown in SEQ ID NO:414 as residues: Pro-20 to Gly-26, Leu-37 to Pro-42, His-57 to Gly-63.

[1260] The tissue distribution in human cerebellum indicates that the protein products of this gene are useful for the treatment/diagnosis of diseases of the central nervous system and may protect or enhance survival of neuronal cells by slowing progression of neurodegenerative diseases. Moreover, the protein product of this gene is useful for the detection/treatment of neurodegenerative disease states, behavioral disorders, or inflammatory conditions which include, but are not limited to Alzheimer's Disease, Parkinson's Disease, Huntington's Disease, Tourette's Syndrome, meningitis, encephalitis, demyelinating diseases, peripheral neuropathies, neoplasia, trauma, congenital malformations, spinal cord injuries, ischemia and infarction, aneurysms, hemorrhages, schizophrenia, mania, dementia, paranoia, obsessive compulsive disorder, depression, panic disorder, learning disabilities, ALS, psychoses, autism, and altered behaviors, including disorders in feeding, sleep patterns, balance, and perception. In addition, elevated expression of this gene product in regions of the brain indicates that it plays a role in normal neural function. Potentially, this gene product is involved in synapse formation, neurotransmission, learning, cognition, homeostasis, or neuronal differentiation or survival. Moreover, the gene or gene product may also play a role in the treatment and/or detection of developmental disorders associated with the developing embryo, sexually-linked disorders, or disorders of the cardiovascular system. Protein, as well as, antibodies directed against the protein may show utility as a tumor marker and/or immunotherapy targets for the above listed tissues.

[1261] Many polynucleotide sequences, such as EST sequences, are publicly available and accessible through sequence databases. Some of these sequences are related to SEQ ID NO:176 and may have been publicly available prior to conception of the present invention. Preferably, such related polynucleotides are specifically excluded from the scope of the present invention. To list every related sequence is cumbersome. Accordingly, preferably excluded from the present invention are one or more polynucleotides comprising a nucleotide sequence described by the general formula of a-b, where a is any integer between 1 to 1334 of SEQ ID NO:176, b is an integer of 15 to 1348, where both a and b correspond to the positions of nucleotide residues shown in SEQ ID NO:176, and where b is greater than or equal to a+14.

[1262] Features of Protein Encoded by Gene No: 167

[1263] In specific embodiments, polypeptides of the invention comprise, or alternatively consists of, the following amino acid sequence: MKLLICGNYLAPSHSESSRRCCLLCFYPLCLEINFGMKVFLSMPFLVLFQSLIQ ED (SEQ ID NO:1099). Moreover, fragments and variants of this polypeptide (such as, for example, fragments as described herein, polypeptides at least 80%, 85%, 90%, 95%, 96%, 97%, 98%, or 99% identical to these polypeptides and polypeptides encoded by the polynucleotide which hybridize, under stringent conditions, to the polynucleotide encoding this polypeptide are encompassed by the invention. Antibodies that bind polypeptides of the invention are also encompassed by the invention. Polynucleotides encoding this polypeptide are also encompassed by the invention.

[1264] The gene encoding the disclosed cDNA is believed to reside on chromosome 15. Accordingly, polynucleotides related to this invention are useful as a marker in linkage analysis for chromosome 15.

[1265] This gene is expressed primarily in human testes tumor, and to a lesser extent, in normal human testes.

[1266] Polynucleotides and polypeptides of the invention are useful as reagents for differential identification of the tissue(s) or cell type(s) present in a biological sample and for diagnosis of diseases and conditions which include, but are not limited to, diseases of the testes, particularly cancer, and other reproductive disorders. Similarly, polypeptides and antibodies directed to these polypeptides, are useful in providing immunological probes for differential identification of the tissue(s) or cell type(s). For a number of disorders of the above tissues or cells, particularly of the male reproductive tissues, expression of this gene at significantly higher or lower levels may be routinely detected in certain tissues or cell types (e.g., reproductive, testicular, and cancerous and wounded tissues) or bodily fluids (e.g., lymph, serum, seminal fluid, plasma, urine, synovial fluid and spinal fluid) or another tissue or cell sample taken from an individual having such a disorder, relative to the standard gene expression level, i.e., the expression level in healthy tissue or bodily fluid from an individual not having the disorder.

[1267] The tissue distribution in human testicular tissue indicates that the protein products of this gene are useful for the treatment/diagnosis of reproductive diseases including cancers. Moreover, the protein may possibly have utility as a contraceptive or may be used to ameliorate disorders related to aberrant male secondary characteristics (e.g. hair, etc.). Protein, as well as, antibodies directed against the protein may, show utility as a tumor marker and/or immunotherapy targets for the above listed tissues.

[1268] Many polynucleotide sequences, such as EST sequences, are publicly available and accessible through sequence databases. Some of these sequences are related to SEQ ID NO:177 and may have been publicly available prior to conception of the present invention. Preferably, such related polynucleotides are specifically excluded from the scope of the present invention. To list every related sequence is cumbersome. Accordingly, preferably excluded from the present invention are one or more polynucleotides comprising a nucleotide sequence described by the general formula of a-b, where a is any integer between 1 to 1488 of SEQ ID NO:177, b is an integer of 15 to 1502, where both a and b correspond to the positions of nucleotide residues shown in SEQ ID NO:177, and where b is greater than or equal to a+14.

[1269] Features of Protein Encoded by Gene No: 168

[1270] The translation product of this gene was found to have homology to the gar2 gene product of Schizosaccharomyces pombe, which is thought to be involved in protein metabolism (See Genbank Accession No. gi|663262). In specific embodiments, polypeptides of the invention comprise, or alternatively consist of, the following amino acid sequences: FSSPQGLKFRSKSSLANYLHKNGETSLKPEDFDFTVLSKRGIKSRYKDCS (SEQ ID NO:1100), ELLCYICWKNTGLFSFFLSVFRGMVSSVKSFLVGEQLLSISEPRFKMSVCKCSF LSTTSTFVPISSDSKKVSSYFSLCSESLAEQNLFMMPEVFCSEQKFDPELNDLSF FFTRLFSSLVTLRVSPHAPASEMQTVLS (SEQ ID NO:1101), and/or TFVPISSDSKKVSSYFSLCSESLAEQNLFMMPEVFC (SEQ ID NO:1102). Moreover, fragments and variants of these polypeptides (such as, for example, fragments as described herein, polypeptides at least 80%, 85%, 90%, 95%, 96%, 97%, 98%, or 99% identical to these polypeptides and polypeptides encoded by the polynucleotide which hybridizes, under stringent conditions, to the polynucleotide encoding these polypeptides) are encompassed by the invention. Antibodies that bind polypeptides of the invention are also encompassed by the invention. Polynucleotides encoding these polypeptides are also encompassed by the invention.

[1271] The gene encoding the disclosed cDNA is believed to reside on chromosome 3. Accordingly, polynucleotides related to this invention are useful as a marker in linkage analysis for chromosome 3.

[1272] This gene is expressed primarily in fetal liver.

[1273] Polynucleotides and polypeptides of the invention are useful as reagents for differential identification of the tissue(s) or cell type(s) present in a biological sample and for diagnosis of diseases and conditions which include, but are not limited to, hepatic disorders, in addition to conditions affecting hematopoietic development and metabolic diseases. Similarly, polypeptides and antibodies directed to these polypeptides are useful in providing immunological probes for differential identification of the tissue(s) or cell type(s). For a number of disorders of the above tissues or cells, particularly of the hepatic system, and fetal hematopoietic system, expression of this gene at significantly higher or lower levels may be routinely detected in certain tissues or cell types (e.g., hepatic, metabolic, hematopoietic, and cancerous and wounded tissues) or bodily fluids (e.g., lymph, serum, bile, plasma, urine, synovial fluid and spinal fluid) or another tissue or cell sample taken from an individual having such a disorder, relative to the standard gene expression level, i.e., the expression level in healthy tissue or bodily fluid from an individual not having the disorder.

[1274] Predicted epitopes include those comprising a sequence shown in SEQ ID NO:416 as residues: His-7 to Trp-17, Leu-19 to Lys-27, Pro-33 to Gly-44, Lys-68 to Gly-74, Lys-85 to Cys-95.

[1275] The tissue distribution in liver, combined with the homology to the gar2 protein, indicates that the protein products of this gene are useful for the treatment/diagnosis of diseases of the developing liver and hematopoietic system, and act as a growth differentiation factor for hematopoietic stem cells. Moreover, the protein product of this gene is useful for the detection and treatment of liver disorders and cancers (e.g. hepatoblastoma, jaundice, hepatitis, liver metabolic diseases and conditions that are attributable to the differentiation of hepatocyte progenitor cells). In addition, the expression in fetus would suggest a useful role for the protein product in developmental abnormalities, fetal deficiencies, pre-natal disorders, and various would-healing models and/or tissue trauma. Protein, as well as, antibodies directed against the protein may show utility as a tumor marker and/or immunotherapy targets for the above listed tissues.

[1276] Many polynucleotide sequences, such as EST sequences, are publicly available and accessible through sequence databases. Some of these sequences are related to SEQ ID NO:178 and may have been publicly available prior to conception of the present invention. Preferably, such related polynucleotides are specifically excluded from the scope of the present invention. To list every related sequence is cumbersome. Accordingly, preferably excluded from the present invention are one or more polynucleotides comprising a nucleotide sequence described by the general formula of a-b, where a is any integer between 1 to 1623 of SEQ ID NO:178, b is an integer of 15 to 1637, where both a and b correspond to the positions of nucleotide residues shown in SEQ ID NO:178, and where b is greater than or equal to a+14.

[1277] Features of Protein Encoded by Gene No: 169

[1278] The polypeptide encoded by this gene is believed to be a membrane bound receptor.

[1279] Additionally, the extracellular domain of this polypeptide is expected to comprise the following amino acid sequence: RILLVKYSANEENKYDYLPTTVNVCSELVKLVFCVLVSFCVIKKDHQSRNLK YASWKEFSDFMKWSIPAFLYFLDNLIVFYVLSYLQPAMAVIFSNFSIITTALLF RIVLKXRLNWIQWASLLTLFLSIVALTAGTKTLQHNLAGRGFHHDAFFSPSNS CLLFRNECPRKDNCTAKEWTFPEAKWNTTARVFSHIRLGMGHVLIIVQCFISS MANIYNEKILKEGNQLTEXIFIQNSKLYFFGILFNGLITLGLQRSNRDQIKNCGF FYGHS (SEQ ID NO:1103), TVNVCSELVKLVFCVLVSFCVIKKDHQSRN (SEQ ID NO:1104), LIVFYVLSYLQPAMAVIFSNFSIITTALLFR (SEQ ID NO:1105), FFSP SNSCLLFRNECPRKDNCTAKEWT (SEQ ID NO:1106), and/or YFFGILFNGLTL GLQRSNRDQIKNCGFF (SEQ ID NO:1107). Accordingly, preferred polypeptides encoded by this gene comprise the extracellular domain, as shown above. It will be recognized, however, that deletions of either end of the extracellular domain up to the first cysteine from the N-terminus and the first cysteine of the C-terminus, is expected to retain the biological functions of the full-length extracellular domain, because the cysteines are thought to be responsible for providing secondary structure to the molecule. Thus, deletions of one or more amino acids from either end (or both ends) of the extracellular domain are contemplated. Of course, further deletions including the cysteines are also contemplated as useful, as such polypeptides is expected to have immunological properties such as the ability to evoke an immune response. Polynucleotides encoding all of the foregoing polypeptides also encompassed by the invention.

[1280] This gene is expressed primarily in human osteoclastoma, and to a lesser extent, in hippocampus and chondrosarcoma.

[1281] Polynucleotides and polypeptides of the invention are useful as reagents for differential identification of the tissue(s) or cell type(s) present in a biological sample and for diagnosis of diseases and conditions which include, but are not limited to, skeletal or connective tissue disorders, particularly cancers. Similarly, polypeptides and antibodies directed to these polypeptides are useful in providing immunological probes for differential identification of the tissue(s) or cell type(s). For a number of disorders of the above tissues or cells, particularly of the skeletal system, expression of this gene at significantly higher or lower levels may be routinely detected in certain tissues or cell types (e.g., skeletal, neural, immune, connective, and cancerous and wounded tissues) or bodily fluids (e.g., lymph, serum, plasma, urine, synovial fluid and spinal fluid) or another tissue or cell sample taken from an individual having such a disorder, relative to the standard gene expression level, i.e., the expression level in healthy tissue or bodily fluid from an individual not having the disorder.

[1282] Predicted epitopes include those comprising a sequence shown in SEQ ID NO:417 as residues: Met-1 to Cys-6, Ala-41 to Tyr-49, Lys-76 to Lys-84.

[1283] The tissue distribution in osteoclastoma and chondrosarcoma indicates that the protein products of this gene are useful for the diagnosis of cancers of the bone and connective tissues, and may act as growth factors for cells involved in bone or connective tissue growth. Moreover, this gene product may show utility in the detection and treatment of disorders and conditions affecting the skeletal system, in particular osteoporosis, bone cancer, as well as, disorders afflicting connective tissues (e.g. arthritis, trauma, tendonitis, chrondomalacia and inflammation), such as in the diagnosis or treatment of various autoimmune disorders such as rheumatoid arthritis, lupus, scleroderma, and dermatomyositis, as well as dwarfism, spinal deformation, and specific joint abnormalities as well as chondrodysplasias (i.e. spondyloepiphyseal dysplasia congenita, familial osteoarthritis, Atelosteogenesis type]I, metaphyseal chondrodysplasia type Schmid). Protein, as well as, antibodies directed against the protein may show utility as a tumor marker and/or immunotherapy targets for the above listed tissues.

[1284] Many polynucleotide sequences, such as EST sequences, are publicly available and accessible through sequence databases. Some of these sequences are related to SEQ ID NO:179 and may have been publicly available prior to conception of the present invention. Preferably, such related polynucleotides are specifically excluded from the scope of the present invention. To list every related sequence is cumbersome. Accordingly, preferably excluded from the present invention are one or more polynucleotides comprising a nucleotide sequence described by the general formula of a-b, where a is any integer between 1 to 2897 of SEQ ID NO:179, b is an integer of 15 to 2911, where both a and b correspond to the positions of nucleotide residues shown in SEQ ID NO:179, and where b is greater than or equal to a+14.

[1285] Features of Protein Encoded by Gene No: 170

[1286] In specific embodiments, polypeptides of the invention comprise, or alternatively consists of, an amino acid sequence selected from the group: NSVPNLQTLAVLTEAIGPEPAIPRXPREPPVATSTPATPSAGPQPLPTGTVLVPG GPAPPCLGEAWALLLPPCRPSLTSCFWSPRPSPWKETGV (SEQ ID NO:1108), VTAGRVGGGGPMPPQGKVGQDPQGPARSRLGGAGARQRVWQVWTWQ QAAPGGXGGWRALGQWPQ (SEQ ID NO:1109), STPATPSAGPQPLPTGTVLVPGGPAP (SEQ ID NO:1110), and/or QDPQGPARSRLGGAGARQR (SEQ ID NO:1111). Moreover, fragments and variants of these polypeptides (such as, for example, fragments as described herein, polypeptides at least 80%, 85%, 90%, 95%, 96%, 97%, 98%, or 99% identical to these polypeptides and polypeptides encoded by the polynucleotide which hybridizes, under stringent conditions, to the polynucleotide encoding these polypeptides) are encompassed by the invention. Antibodies that bind polypeptides of the invention are also encompassed by the invention. Polynucleotides encoding these polypeptides are also encompassed by the invention.

[1287] This gene is expressed primarily in hematopoietic progenitor cells.

[1288] Polynucleotides and polypeptides of the invention are useful as reagents for differential identification of the tissue(s) or cell type(s) present in a biological sample and for diagnosis of diseases and conditions which include, but are not limited to, hematopoietic or immune disorders, particularly cancer and autoimmune disorders. Similarly, polypeptides and antibodies directed to these polypeptides are useful in providing immunological probes for differential identification of the tissue(s) or cell type(s). For a number of disorders of the above tissues or cells, particularly of the blood/circulatory system, expression of this gene at significantly higher or lower levels may be routinely detected in certain tissues or cell types (e.g., hematopoietic, immune, and cancerous and wounded tissues) or bodily fluids (e.g., lymph, serum, plasma, urine, synovial fluid and spinal fluid) or another tissue or cell sample taken from an individual having such a disorder, relative to the standard gene expression level, i.e., the expression level in healthy tissue or bodily fluid from an individual not having the disorder.

[1289] Predicted epitopes include those comprising a sequence shown in SEQ ID NO:418 as residues: Gln-4 to His-10, Pro-25 to His-32.

[1290] The tissue distribution in hematopoietic progenitor cells indicates that the protein products of this gene are useful for diagnosis of diseases involving growth differentiation of hematopoietic cells. Moreover, the protein product of this gene is useful for the treatment and diagnosis of hematopoetic related disorders such as anemia, pancytopenia, leukopenia, thrombocytopenia or leukemia since stromal cells are important in the production of cells of hematopoietic lineages. The uses include bone marrow cell ex vivo culture, bone marrow transplantation, bone marrow reconstitution, radiotherapy or chemotherapy of neoplasia. The gene product may also be involved in lymphopoiesis, therefore, it can be used in immune disorders such as infection, inflammation, allergy, immunodeficiency etc. In addition, this gene product may have commercial utility in the expansion of stem cells and committed progenitors of various blood lineages, and in the differentiation and/or proliferation of various cell types. Protein, as well as, antibodies directed against the protein may show utility as a tumor marker and/or immunotherapy targets for the above listed tissues.

[1291] Many polynucleotide sequences, such as EST sequences, are publicly available and accessible through sequence databases. Some of these sequences are related to SEQ ID NO:180 and may have been publicly available prior to conception of the present invention. Preferably, such related polynucleotides are specifically excluded from the scope of the present invention. To list every related sequence is cumbersome. Accordingly, preferably excluded from the present invention are one or more polynucleotides comprising a nucleotide sequence described by the general formula of a-b, where a is any integer between 1 to 505 of SEQ ID NO:180, b is an integer of 15 to 519, where both a and b correspond to the positions of nucleotide residues shown in SEQ ID NO:180, and where b is greater than or equal to a+14.

[1292] Features of Protein Encoded by Gene No: 171

[1293] In specific embodiments, polypeptides of the invention comprise, or alternatively consists of, an amino acid sequence selected from the group: ALQLAFYPDAVEEWLEENVHPSLQRLQXLLQDLSEVSAPP (SEQ ID NO:1112), CHPPALAGTLLRTPEGRAHARGLLLEAGGA (SEQ ID NO:1113), GSSSTRSWFSTSSPQRSASWHSGAPSCRSWRLPCSWLSTRMPWRSGWRKTCT PACSGCK (SEQ ID NO:1114), ASTLQPSLSPSSPPLXPPVETAVXSRALRREGAGSFPGSNILALVTQVSLHLRSS VDALLEGNRYVTGWFSPYHRQRKLIHPV (SEQ ID NO:1115), PLGPEKAGLAXPLVXHAARPCPSTSLQSQCSPSLXXEPXXPPRSXVISGGFDE DVKAKVENLLGISSLEKTDPVRQAPCSPPCPLLPLPFXRPWRQLFSAGLSAGR GPAPSLAATSLPLSHKSASICAALWMRCWRATGMSLAGSAPTTASGSSSTRS WFSTSSPQRSASWHSGAPSCRSWRLPCSWLSTRMPWRSGWRKTCTPACSGC KLCCRTSARCLPPRCHPPALAGTLLRTPEGRAHARGLLLEAGGALXXXXAW AIRPTWASCPLAQQCLAHTQFLRALGSPWGRD (SEQ ID NO:1116), FQEDLMKMLKRKWRTFSGFPAWKKRTLLGKHPAALPVPFFPSPSPARGDSCX QQGSPQGGGRLLPWQQHPCPCHTSQPPSAQLCGCAAGGQQVCHWLVQPLPP PAEAHPPGHGSAHPARSAQPPGTVEHPRAGAGGCPAAGFLPGCRGGVAGGK RAPQPAAAAXSAAGPQRGVCPPAATHQPWQGRCSGPLRGELMPGGSCWRL GGLCXXXWPGQYGPRGRRALWPSSVLPTLSS (SEQ ID NO:1117), ALPSGVLSNVPARAGGWQRGGRHLAEVLQQSLQPLQAGVHVFLQPLLHGIR VESQLQGSLQLLHEGAPLCQEAERCGLDVLNHDRVDELPLAVVGAEPASDIP VALQQRIHRAAQMEADLCDKGKDVAAREGAGPLPAESPAENSCLHGRXKGR GRRGQGGLQGACLTGSVFSRLEIPRRFSTFALTSSSNPPEITXXRGGXXGSXXR EGLHWDCRLVLGHGRAAWXTNGQANPAFSGPKG (SEQ ID NO:1118), RQLFSAGLSAGRGPAPSLAATSLPLSHKS (SEQ ID NO:119), ELPLAVVGAEPASDIPVALQQRJHRAAQ (SEQ ID NO:1120), and/or QPPGTVEHPRAGAGGCPAAGFLPGCRG (SEQ ID NO:1121). Moreover, fragments and variants of these polypeptides (such as, for example, fragments as described herein, polypeptides at least 80%, 85%, 90%, 95%, 96%, 97%, 98%, or 99% identical to these polypeptides and polypeptides encoded by the polynucleotide which hybridizes, under stringent conditions, to the polynucleotide encoding these polypeptides) are encompassed by the invention. Antibodies that bind polypeptides of the invention are also encompassed by the invention. Polynucleotides encoding these polypeptides are also encompassed by the invention.

[1294] The protein product of this gene shares sequence homology with metallothionines. Thus, polypeptides encoded by this gene are expected to have metallothionine activity. Furthermore, such activities are known in the art and described elsewhere herein.

[1295] This gene is expressed primarily in kidney cortex.

[1296] Polynucleotides and polypeptides of the invention are useful as reagents for differential identification of the tissue(s) or cell type(s) present in a biological sample and for diagnosis of diseases and conditions which include, but are not limited to, renal disorders, particularly diseases of the kidney including cancer and renal dysfunction. Similarly, polypeptides and antibodies directed to these polypeptides are useful in providing immunological probes for differential identification of the tissue(s) or cell type(s). For a number of disorders of the above tissues or cells, particularly of the renal system, expression of this gene at significantly higher or lower levels may be routinely detected in certain tissues or cell types (e.g., renal, urogenital, and cancerous and wounded tissues) or bodily fluids (e.g., lymph, serum, plasma, urine, synovial fluid and spinal fluid) or another tissue or cell sample taken from an individual having such a disorder, relative to the standard gene expression level, i.e., the expression level in healthy tissue or bodily fluid from an individual not having the disorder.

[1297] Predicted epitopes include those comprising a sequence shown in SEQ ID NO:419 as residues: Ser-47 to Gln-52.

[1298] The tissue distribution in kidney cortex indicates that the protein product of this gene is useful for the treatment/diagnosis of diseases of the kidney, including kidney failure. Moreover, this gene or gene product could be used in the treatment and/or detection of kidney diseases including nephritus, renal tubular acidosis, proteinuria, pyuria, edema, pyelonephritis, hydronephritis, nephrotic syndrome, crush syndrome, glomerulonephritis, hematuria, renal colic and kidney stones, in addition to Wilms Tumor Disease, and congenital kidney abnormalities such as horseshoe kidney, polycystic kidney, and Falconi's syndrome. Protein, as well as, antibodies directed against the protein may show utility as a tumor marker and/or immunotherapy targets for the above listed tissues.

[1299] Many polynucleotide sequences, such as EST sequences, are publicly available and accessible through sequence databases. Some of these sequences are related to SEQ ID NO:181 and may have been publicly available prior to conception of the present invention. Preferably, such related polynucleotides are specifically excluded from the scope of the present invention. To list every related sequence is cumbersome. Accordingly, preferably excluded from the present invention are one or more polynucleotides comprising a nucleotide sequence described by the general formula of a-b, where a is any integer between 1 to 954 of SEQ ID NO:181, b is an integer of 15 to 968, where both a and b correspond to the positions of nucleotide residues shown in SEQ ID NO:181, and where b is greater than or equal to a+14.

[1300] Features of Protein Encoded by Gene No: 172

[1301] In specific embodiments, polypeptides of the invention comprise, or alternatively consist of, the following amino acid sequences: SVFERTNEFRDVLWSSI (SEQ ID NO:1122), GVVQVTFMSSVSRVTWGCQPSICPGAPPAAALAGGLRLLFERELFGLPVSSPL ICSFLEHHPRTSPPPSDCELLEGRSCVLLFIFLSPEPCTDPGMW (SEQ ID NO:1123), SKQIHSFVHSFIHLFNTHLLSTYHIPGSVQGSGDRKMNRRTQLLPSRSSQSDGG GDVLGWCSKKEQIRGEETGRPNSSLSKRSLRPPARAAAGGAPGQMLG (SEQ ID NO:1124), VTWGCQPSICPGAPPAAALAGGLRLLFE (SEQ ID NO:1125). and/or EQIRGEETGRPNSSLSKRSLRPP (SEQ ID NO:1126). Moreover, fragments and variants of these polypeptides (such as, for example, fragments as described herein, polypeptides at least 80%, 85%, 90%, 95%, 96%, 97%, 98%, or 99% identical to these polypeptides and polypeptides encoded by the polynucleotide which hybridizes, under stringent conditions, to the polynucleotide encoding these polypeptides) are encompassed by the invention. Antibodies that bind polypeptides of the invention are also encompassed by the invention. Polynucleotides encoding these polypeptides are also encompassed by the invention.

[1302] This gene is expressed primarily in 12 week old early stage human.

[1303] Polynucleotides and polypeptides of the invention are useful as reagents for differential identification of the tissue(s) or cell type(s) present in a biological sample and for diagnosis of diseases and conditions which include, but are not limited to, developmental abnormalities. Similarly, polypeptides and antibodies directed to these polypeptides are useful in providing immunological probes for differential identification of the tissue(s) or cell type(s). For a number of disorders of the above tissues or cells, particularly of the developing embryo, expression of this gene at significantly higher or lower levels may be routinely detected in certain tissues or cell types (e.g., developmental, and cancerous and wounded tissues) or bodily fluids (e.g., lymph, amniotic fluid, serum, plasma, urine, synovial fluid and spinal fluid) or another tissue or cell sample taken from an individual having such a disorder, relative to the standard gene expression level, i.e., the expression level in healthy tissue or bodily fluid from an individual not having the disorder.

[1304] Predicted epitopes include those comprising a sequence shown in SEQ ID NO:420 as residues: Gln-31 to Thr-43, Gly-51 to Ser-58, Pro-65 to Pro-72.

[1305] The tissue distribution in embryonic tissue indicates that the protein product of this gene is useful for treatment/diagnosis of developmental conditions. The gene may be involved in vital organ development in the early stage, especially hematopoiesis, the cardiovascular system, and neural development. Moreover, expression within embryonic tissue indicates that this protein may play a role in the regulation of cellular division, and may show utility in the diagnosis and treatment of cancer and other proliferative disorders. Similarly, developmental tissues rely on decisions involving cell differentiation and/or apoptosis in pattern formation. Thus this protein may also be involved in apoptosis or tissue differentiation and could again be useful in cancer therapy. Protein, as well as, antibodies directed against the protein may show utility as a tumor marker and/or immunotherapy targets for the above listed tissues.

[1306] Many polynucleotide sequences, such as EST sequences, are publicly available and accessible through sequence databases. Some of these sequences are related to SEQ ID NO:182 and may have been publicly available prior to conception of the present invention. Preferably, such related polynucleotides are specifically excluded from the scope of the present invention. To list every related sequence is cumbersome. Accordingly, preferably excluded from the present invention are one or more polynucleotides comprising a nucleotide sequence described by the general formula of a-b, where a is any integer between 1 to 1114 of SEQ ID NO:182, b is an integer of 15 to 1128, where both a and b correspond to the positions of nucleotide residues shown in SEQ ID NO:182, and where b is greater than or equal to a+14.

[1307] Features of Protein Encoded by Gene No: 173

[1308] The translation product of this gene shares sequence homology with TGN38, an integral membrane protein previously shown to be predominantly localized to the trans-Golgi network (TGN) of cells. The gene encoding the disclosed cDNA is believed to reside on chromosome 5. Accordingly, polynucleotides related to this invention are useful as a marker in linkage analysis for chromosome 5.

[1309] This gene is expressed primarily in developing embryo, and to a lesser extent, in cancer tissues including lymphoma, endometrial, prostate and colon.

[1310] Polynucleotides and polypeptides of the invention are useful as reagents for differential identification of the tissue(s) or cell type(s) present in a biological sample and for diagnosis of diseases and conditions which include, but are not limited to, developmental abnormalities and cancer. Similarly, polypeptides and antibodies directed to these polypeptides are useful in providing immunological probes for differential identification of the tissue(s) or cell type(s). For a number of disorders of the above tissues or cells, particularly of the developing fetus, expression of this gene at significantly higher or lower levels may be routinely detected in certain tissues or cell types (e.g., developmental, reproductive, immune, gastrointestinal, and cancerous and wounded tissues) or bodily fluids (e.g., lymph, anmiotic fluid, seminal fluid, serum, plasma, urine, synovial fluid and spinal fluid) or another tissue or cell sample taken from an individual having such a disorder, relative to the standard gene expression level, i.e., the expression level in healthy tissue or bodily fluid from an individual not having the disorder.

[1311] Predicted epitopes include those comprising a sequence shown in SEQ ID NO:421 as residues: His-65 to Ser-72, Pro-82 to Gly-91, Pro-98 to Glu-118, Ser-126 to Gly-166, Pro-180 to Asp-188, Tyr-209 to Lys-214, Gln-220 to Leu-228.

[1312] The tissue distribution in the embryo, combined with the homology to an integral membrane protein indicates that the protein product of this gene is useful for the diagnosis of cancers and developmental abnormalities where aberrant expression relates to an abnormality. Expression within embryonic tissue and other cellular sources marked by proliferating cells indicates that this protein may play a role in the regulation of cellular division, and may show utility in the diagnosis and treatment of cancer and other proliferative disorders. Similarly, developmental tissues rely on decisions involving cell differentiation and/or apoptosis in pattern formation. Thus this protein may also be involved in apoptosis or tissue differentiation and could again be useful in cancer therapy. Protein, as well as, antibodies directed against the protein may show utility as a tumor marker and/or immunotherapy targets for the above listed tissues.

[1313] Many polynucleotide sequences, such as EST sequences, are publicly available and accessible through sequence databases. Some of these sequences are related to SEQ ID NO:183 and may have been publicly available prior to conception of the present invention. Preferably, such related polynucleotides are specifically excluded from the scope of the present invention. To list every related sequence is cumbersome. Accordingly, preferably excluded from the present invention are one or more polynucleotides comprising a nucleotide sequence described by the general formula of a-b, where a is any integer between 1 to 2262 of SEQ ID NO:183, b is an integer of 15 to 2276, where both a and b correspond to the positions of nucleotide residues shown in SEQ ID NO:183, and where b is greater than or equal to a+14.

[1314] Features of Protein Encoded by Gene No: 174

[1315] The translation product of this gene shares sequence homology with a dnaJ heat shock protein from E. coli which is allelic to sec63, a gene that affects transit of nascent secretory proteins across the endoplasmic reticulum in yeast.

[1316] In specific embodiments, polypeptides of the invention comprise, or alternatively consist of, the following amino acid sequences: QWEHLLLLPHLLRGAHRDPGDILPLAPRSECRANSIKEYQKSIWKVYVVRLRL LKPQPNIIPTVKKIVLLAGWALFLFLAYKVSKTDREYQEYNPYEVLNLDPGAT VAEIKKQYRLLSLKYHPDKGGDEV (SEQ ID NO:1127), EERGGGGGAMAGQQFQYDDSGNTFFYFLTSFVGLIVIPATYYLWPRDQNAEQ IRLKNIRKVYGRC (SEQ ID NO:1128), RLYTGCVIFDLVSNRALSFRCMLCCNSCHSASSSLFCFSSCSLSESLSLPSSFSL WESLLVSSSSESLPLSETSSSSSFTAASFPTTPFACFCFCCFDCGNSTGVGFFFK GFFFFDLAVFLGPLLFCCHPPFVLFLLVSPCPSSAGCSSAAQMDCSFSNTSAIV CLVNLTNTVTKDPTVMLLLSSSSNTCDFISMVTYGKLPRTAITSSYFSSSRKCS RV (SEQ ID NO:1129), YQKSIWKVYVVRLRLLKPQPNIIPTVKKIVLLAGW (SEQ ID NO:1130), and/or CHPPFVLFLLVSPCPSSAGCSSAAQMDCSFSNTSA (SEQ ID NO:1131). Moreover, fragments and variants of these polypeptides (such as, for example, fragments as described herein, polypeptides at least 80%, 85%, 90%, 95%, 96%, 97%, 98%, or 99% identical to these polypeptides and polypeptides encoded by the polynucleotide which hybridizes, under stringent conditions, to the polynucleotide encoding these polypeptides) are encompassed by the invention. Antibodies that bind polypeptides of the invention are also encompassed by the invention. Polynucleotides encoding these polypeptides are also encompassed by the invention.

[1317] This gene is expressed primarily in Hodgkin's lymphoma, and to a lesser extent, in testes.

[1318] Polynucleotides and polypeptides of the invention are useful as reagents for differential identification of the tissue(s) or cell type(s) present in a biological sample and for diagnosis of diseases and conditions which include, but are not limited to, immune or hematopoietic disorders, particularly cancer. Similarly, polypeptides and antibodies directed to these polypeptides are useful in providing immunological probes for differential identification of the tissue(s) or cell type(s). For a number of disorders of the above tissues or cells, particularly of the immune system, expression of this gene at significantly higher or lower levels may be routinely detected in certain tissues or cell types (e.g., immune, hematopoietic, reproductive, testicular, and cancerous and wounded tissues) or bodily fluids (e.g., lymph, seminal fluid, serum, plasma, urine, synovial fluid and spinal fluid) or another tissue or cell sample taken from an individual having such a disorder, relative to the standard gene expression level, i.e., the expression level in healthy tissue or bodily fluid from an individual not having the disorder.

[1319] Predicted epitopes include those comprising a sequence shown in SEQ ID NO:422 as residues: Val-37 to Pro-49, His-76 to Asp-82, Thr-97 to Trp-105, Arg-158 to Asp-165, Glu-199 to Asp-214, Asn-229 to Pro-236, Thr-261 to Gln-266, Arg-292 to Glu-298, Glu-335 to Lys-351, Glu-372 to Glu-377, Leu-398 to Asn-405, Glu-437 to Pro-480, Gln-487 to Gln-495, Lys-507 to Ala-555, Ser-563 to Arg-569, Pro-588 to Glu-593, Lys-618 to Val-623, Pro-630 to Asn-635, Ser-644 to Gly-649, Lys-664 to Trp-673, Gly-679 to Phe-689, Asp-691 to Asp-704.

[1320] The tissue distribution in Hodgkin's lymphoma, combined with the homology to dnaJ and sec63 indicates that the protein product of this gene is useful as a diagnostic for cancer, that the protein may be useful in regulating gene expression levels, and that it is essential for normal protein metabolism. Therefore, protein products of this gene may show utility as an anticancer agent, or even serve to protect from viral or bacterial infections, based upon its homologous function as a protein chaperone. Protein, as well as, antibodies directed against the protein may show utility as a tumor marker and/or immunotherapy targets for the above listed tissues.

[1321] Many polynucleotide sequences, such as EST sequences, are publicly available and accessible through sequence databases. Some of these sequences are related to SEQ ID NO:184 and may have been publicly available prior to conception of the present invention. Preferably, such related polynucleotides are specifically excluded from the scope of the present invention. To list every related sequence is cumbersome. Accordingly, preferably excluded from the present invention are one or more polynucleotides comprising a nucleotide sequence described by the general formula of a-b, where a is any integer between 1 to 3360 of SEQ ID NO:184, b is an integer of 15 to 3374, where both a and b correspond to the positions of nucleotide residues shown in SEQ ID NO:184, and where b is greater than or equal to a+14.

[1322] Features of Protein Encoded by Gene No: 175

[1323] The gene encoding the disclosed cDNA is believed to reside on chromosome 5. Accordingly, polynucleotides related to this invention are useful as a marker in linkage analysis for chromosome 5. Contact of cells with supernatant expressing the product of this gene has been shown to increase the permeability of the plasma membrane of chondrocytes to calcium. Thus it is likely that the product of this gene is involved in a signal transduction pathway that is initiated when the product binds a receptor on the surface of the plasma membrane of both chondrocytes, in addition to other cell-lines or tissue cell types. Thus, polynucleotides and polypeptides have uses which include, but are not limited to, activating chondrocytes.

[1324] This gene is expressed primarily in endothelial cells, and to a lesser extent, in bone marrow stromal cells.

[1325] Polynucleotides and polypeptides of the invention are useful as reagents for differential identification of the tissue(s) or cell type(s) present in a biological sample and for diagnosis of diseases and conditions which include, but are not limited to, immune, hematopoietic, endothelial, or vascular disorders, such as diseases involving angiogenic abnormalities including diabetic retinopathy, macular degeneration, and other diseases including arteriosclerosis and cancer. Similarly, polypeptides and antibodies directed to these polypeptides are useful in providing immunological probes for differential identification of the tissue(s) or cell type(s). For a number of disorders of the above tissues or cells, particularly of the vascular system, expression of this gene at significantly higher or lower levels may be routinely detected in certain tissues or cell types (e.g., immune, hematopoietic, endothelial, vascular, and cancerous and wounded tissues) or bodily fluids (e.g., lymph, serum, plasma, urine, synovial fluid and spinal fluid) or another tissue or cell sample taken from an individual having such a disorder, relative to the standard gene expression level, i.e., the expression level in healthy tissue or bodily fluid from an individual not having the disorder.

[1326] The tissue distribution in endothelial cells indicates that the protein products of this gene are useful for treating diseases where an increase or decrease in angiogenesis is indicated and as a factor in the wound healing process. In addition, the protein product of this gene may show utility in the treatment, detection, and/or prevention of a variety of vascular disorders, which include, but are not limited to microvascular disease, embolism, thrombosis, atherosclerosis, aneurysm, or stroke. Moreover, the protein product of this gene is useful for the treatment and diagnosis of hematopoetic related disorders such as anemia, pancytopenia, leukopenia, thrombocytopenia or leukemia since stromal cells are important in the production of cells of hematopoietic lineages. The uses include bone marrow cell ex vivo culture, bone marrow transplantation, bone marrow reconstitution, radiotherapy or chemotherapy of neoplasia. The gene product may also be involved in lymphopoiesis, therefore, it can be used in immune disorders such as infection, inflammation, allergy, immunodeficiency etc. In addition, this gene product may have commercial utility in the expansion of stem cells and committed progenitors of various blood lineages, and in the differentiation and/or proliferation of various cell types. Protein, as well as, antibodies directed against the protein may show utility as a tumor marker and/or immunotherapy targets for the above listed tissues.

[1327] Many polynucleotide sequences, such as EST sequences, are publicly available and accessible through sequence databases. Some of these sequences are related to SEQ ID NO:185 and may have been publicly available prior to conception of the present invention. Preferably, such related polynucleotides are specifically excluded from the scope of the present invention. To list every related sequence is cumbersome. Accordingly, preferably excluded from the present invention are one or more polynucleotides comprising a nucleotide sequence described by the general formula of a-b, where a is any integer between 1 to 1323 of SEQ ID NO:185, b is an integer of 15 to 1337, where both a and b correspond to the positions of nucleotide residues shown in SEQ ID NO:185, and where b is greater than or equal to a+14.

[1328] Features of Protein Encoded by Gene No: 176

[1329] The translation product of this gene shares sequence homology with both the RIC and MAT8 proteins (mouse), which are thought to be important in regulating chloride conductance in cells by modulating the response mediated by cAMP and protein kinase C to extracellular signals. In specific embodiments, polypeptides of the invention comprise, or alternatively consist of, the following amino acid sequences: GTSLDAAATAASLSPRGCRLRTPSSD (SEQ ID NO:1132), QIQRHTRAPKQLIPLMTPRRSLRDHPQAQTSRQTPRPSSHLVFMRMTPS SMM NTPSGNGGCWSQLCCSSQASSSSPVASAGSCPGYAGIIAGESIRNRS (SEQ ID NO:1133), PRRSLRDHPQAQTSRQTPRPSSHLVFM (SEQ ID NO:1134), THPPETGAVGRSCAVHHRHHHPHQWQVQAAVPVMPESLQVSPSETGADNXL GTRRPSPLPAHRAQPPASPRRAWPEREDTDDEAGARAAGPSLLPPPTLPAPEG YLAPWGLSLKLSPLLRQKVKHCGLC (SEQ ID NO:1135), PESLQVSPSETGADNXLGTRRPSPLPAHRAQPPASP (SEQ ID NO:1136), GTAPKAPGSLQGRAGLGEVGDSDRQPWLQLHHLCIPSLARLFEGMQEAGHG ELAGGLVFGCPAGCQLLFLMDSPAMIPA (SEQ ID NO:1137), GEVGDSDRQPWLQLHHLCLPSLARLFEGMQEAGH (SEQ ID NO:1138), GSGGLSGRLCLGMVSQRASWCHQWDELLWCSCVSLDLSLEAHPFLPVAGSG SGVVVFHQQARLGLERWAGVLCRLHLGLVSGPECP (SEQ ID NO:1139), and/or QWDELLWCSCVSLDLSLEAHPFLPVAGSGSGVVVFHQQARL (SEQ ID NO:1140). Moreover, fragments and variants of these polypeptides (such as, for example, fragments as described herein, polypeptides at least 80%, 85%, 90%, 95%, 96%, 97%, 98%, or 99% identical to these polypeptides and polypeptides encoded by the polynucleotide which hybridizes, under stringent conditions, to the polynucleotide encoding these polypeptides) are encompassed by the invention. Antibodies that bind polypeptides of the invention are also encompassed by the invention. Polynucleotides encoding these polypeptides are also encompassed by the invention.

[1330] The gene encoding the disclosed cDNA is believed to reside on chromosome 19. Accordingly, polynucleotides related to this invention are useful as a marker in linkage analysis for chromosome 19.

[1331] This gene is expressed primarily in amniotic cells and hematopoietic cells including macrophages, neutrophils, T cells, TNF induced aortic endothelium, and to a lesser extent in testes, TNF induced epithelial cells, and smooth muscle.

[1332] Polynucleotides and polypeptides of the invention are useful as reagents for differential identification of the tissue(s) or cell type(s) present in a biological sample and for diagnosis of diseases and conditions which include, but are not limited to, immune or hematopoietic disorders, particularly inflammatory responses mediated by T cells, macrophages, and/or neutrophils, particularly those involving TNF, and also cancer. Similarly, polypeptides and antibodies directed to these polypeptides are useful in providing immunological probes for differential identification of the tissue(s) or cell type(s). For a number of disorders of the above tissues or cells, particularly of the immune system, expression of this gene at significantly higher or lower levels may be routinely detected in certain tissues or cell types (e.g., immune, hematopoietic, developmental, and cancerous and wounded tissues) or bodily fluids (e.g., lymph, serum, plasma, urine, synovial fluid and spinal fluid) or another tissue or cell sample taken from an individual having such a disorder, relative to the standard gene expression level, i.e., the expression level in healthy tissue or bodily fluid from an individual not having the disorder.

[1333] Predicted epitopes include those comprising a sequence shown in SEQ ID NO:424 as residues: Thr-19 to Ala-33, Leu-54 to Asp-82, Pro-89 to Ala-97, Pro-100 to Lys-125, Ser-127 to Phe-135, Gly-164 to Leu-169, Cys-173 to Arg-178.

[1334] The tissue distribution in hematopoietic cells, combined with the homology to the RIC and mat-8 genes, indicates that the protein product of this gene is useful for modifying inflammatory responses to cytokines such as TNF, and thus modifying the duration and/or severity of inflammation. Polynucleotides and polypeptides derived from this gene are thought to be useful in the diagnosis and treatment of cancer. The protein product of this gene is useful for the treatment and diagnosis of hematopoetic related disorders such as anemia, pancytopenia, leukopenia, thrombocytopenia or leukemia, since stromal cells are important in the production of cells of hematopoietic lineages. The uses include bone marrow cell ex vivo culture, bone marrow transplantation, bone marrow reconstitution, radiotherapy or chemotherapy of neoplasia. The gene product may also be involved in lymphopoiesis, therefore, it can be used in immune disorders such as infection, inflammation, allergy, immunodeficiency etc. In addition, this gene product may have commercial utility in the expansion of stem cells and committed progenitors of various blood lineages, and in the differentiation and/or proliferation of various cell types. Protein, as well as, antibodies directed against the protein may show utility as a tumor marker and/or immunotherapy targets for the above listed tissues.

[1335] Many polynucleotide sequences, such as EST sequences, are publicly available and accessible through sequence databases. Some of these sequences are related to SEQ ID NO:186 and may have been publicly available prior to conception of the present invention. Preferably, such related polynucleotides are specifically excluded from the scope of the present invention. To list every related sequence is cumbersome. Accordingly, preferably excluded from the present invention are one or more polynucleotides comprising a nucleotide sequence described by the general formula of a-b, where a is any integer between 1 to 927 of SEQ ID NO:186, b is an integer of 15 to 941, where both a and b correspond to the positions of nucleotide residues shown in SEQ ID NO:186, and where b is greater than or equal to a+14.

[1336] Features of Protein Encoded by Gene No: 177

[1337] This gene is expressed primarily in endothelial cells.

[1338] Polynucleotides and polypeptides of the invention are useful as reagents for differential identification of the tissue(s) or cell type(s) present in a biological sample and for diagnosis of diseases and conditions which include, but are not limited to, vascular disorders, including vascular restenosis. Similarly, polypeptides and antibodies directed to these polypeptides are useful in providing immunological probes for differential identification of the tissue(s) or cell type(s). For a number of disorders of the above tissues or cells, particularly of the vascular system, expression of this gene at significantly higher or lower levels may be routinely detected in certain tissues or cell types (e.g., vascular, endothelial, and cancerous and wounded tissues) or bodily fluids (e.g., lymph, serum, plasma, urine, synovial fluid and spinal fluid) or another tissue or cell sample taken from an individual having such a disorder, relative to the standard gene expression level, i.e., the expression level in healthy tissue or bodily fluid from an individual not having the disorder.

[1339] The tissue distribution in endothelial tissue indicates that the protein product of this gene is useful for treating diseases associated with vascular responses to injury such as vascular restenosis following angioplasty. Moreover, the protein product of this gene is useful for the treatment, detection, and/or prevention of a variety of other vascular disorders, which include, but are not limited to microvascular disease, embolism, thrombosis, atherosclerosis, aneurysm, or stroke. Protein, as well as, antibodies directed against the protein may show utility as a tumor marker and/or immunotherapy targets for the above listed tissues.

[1340] Many polynucleotide sequences, such as EST sequences, are publicly available and accessible through sequence databases. Some of these sequences are related to SEQ ID NO:187 and may have been publicly available prior to conception of the present invention. Preferably, such related polynucleotides are specifically excluded from the scope of the present invention. To list every related sequence is cumbersome. Accordingly, preferably excluded from the present invention are one or more polynucleotides comprising a nucleotide sequence described by the general formula of a-b, where a is any integer between 1 to 664 of SEQ ID NO:187, b is an integer of 15 to 678, where both a and b correspond to the positions of nucleotide residues shown in SEQ ID NO:187, and where b is greater than or equal to a+14.

[1341] Features of Protein Encoded by Gene No: 178

[1342] This gene appears to be chimeric. There are two ORFs of interest. The first ORF-1 encodes a polypeptide preferably comprising one of the following polypeptide sequences: MRPDWKAGAGPGGPPQKPAPSSQRKPPARPSAAAAAIAVAAAEEERRLRQR NRLRLEEDKPAVERCLEELVFGDVENDEDALLRRLRGPRVQEHEDSGDSEVE NEAKGNFPPQKKPVWVDEEDEDEEMVDMMNNRFRKDMMKNASESKLSKD NLKKRLKEEFQHAMGGVPAWAETTKRKTSSDDESEEDEDDLLQRTGNFISTS TSLPRGILKMKNCQHANAERPTVARISICAVPSRCTDCDGCWD (SEQ ID NO:1141); and/or CLEELVFGDVENDEDALLRRLRGPRVQEHEDSGDSEVENEAKGNFPPQKKPV WVDEEDEDEEMVDMMNNRFRKDMMKNASESKLSKDNLKKRLKEEFQHAM GGVPAWAETTKRKTSSDDESEEDEDDLLQRTGNFISTSTSLPRGILKMKNCQH ANAERPTVARISICAVPSRCTDCDGC (SEQ ID NO:1142). The second ORF (ORF-2) encodes a polypeptide preferably comprising one of the following polypeptide sequences: LKEKIVRSFEVSPDGSFLLINGIAGYLHLLAMKTKELIGSMKINGRVAASTFSS DSKKVYASSGDGEVYVWDVNSRKCLNRFVDEGSLYGLSIATSRNGQYVACG SNCGVVNIYNQDSCLQETNPKPIKAIMNLVTGVTSLTFNPTTEILAIASEKMKE AVRLVHLPSCTVFSNFPVIKNKNISHVHTMDFSPRSGYFALGNEKGKALMYR LHHYSDF (SEQ ID NO:1143); and/or KINGRVAASTFSSDSKKVYASSGDGEVYVWDVNSRKCLNRFVDEGSLYGLSI ATSRNGQYVACGSNCGVVNIYNQDSCLQETNPKPIKAIMNLVTGVTSLTFNP TTEILAIASEKMKEAVRLVHLPSCTVFSNFPVIKNKNSHVHTMDFSPRSGYFA LGNEKGKAL (SEQ ID NO:1144).

[1343] In specific embodiments, polypeptides of the invention comprise, or alternatively consist of, the following amino acid sequences: WLLGLDNAVSLFQVDGKTNPKIQSIYLERFPIFKACFSANGEEVLATSTHSKV LYVYD (SEQ ID NO:1145), LVFGDVENDEDALLRRLRGPRVQ (SEQ ID NO:1146), KNASESKLSKDNLKKRLKEEFQHAMGGVP (SEQ ID NO:1147), and/or SLPRGILKMKNCQHANAERPTVA (SEQ ID NO:1148). Moreover, fragments and variants of these polypeptides (such as, for example, fragments as described herein, polypeptides at least 80%, 85%, 90%, 95%, 96%, 97%, 98%, or 99% identical to these polypeptides and polypeptides encoded by the polynucleotide which hybridizes, under stringent conditions, to the polynucleotide encoding these polypeptides) are encompassed by the invention. Antibodies that bind polypeptides of the invention are also encompassed by the invention. Polynucleotides encoding these polypeptides are also encompassed by the invention.

[1344] The translation product of this gene shares homology with the transcriptional repressor TUP1 of Candida albicans (See Genbank Accession No. gi|2245634 (AF005741)), which is thought to modulate the expression levels of cellular filament and may implicate this protein as serving a useful role in the amelioration of proliferating cells and tissues.

[1345] This gene is expressed primarily in epidydimus and endometrial tumors, and to a lesser extent, in T cell lymphoma and cell lines derived from colon cancer.

[1346] Polynucleotides and polypeptides of the invention are useful as reagents for differential identification of the tissue(s) or cell type(s) present in a biological sample and for diagnosis of diseases and conditions which include, but are not limited to, reproductive or developmental conditions, which include tumors of the reproductive organs, including testis and endometrial cells. Similarly, polypeptides and antibodies directed to these polypeptides are useful in providing immunological probes for differential identification of the tissue(s) or cell type(s). For a number of disorders of the above tissues or cells, particularly of the reproductive system, expression of this gene at significantly higher or lower levels may be routinely detected in certain tissues or cell types (e.g., reproductive, developmental, and cancerous and wounded tissues) or bodily fluids (e.g., lymph, amniotic fluid, seminal fluid, serum, plasma, urine, synovial fluid and spinal fluid) or another tissue or cell sample taken from an individual having such a disorder, relative to the standard gene expression level, i.e., the expression level in healthy tissue or bodily fluid from an individual not having the disorder.

[1347] Predicted epitopes include those comprising a sequence shown in SEQ ID NO:426 as residues: Ser-67 to Lys-72, Val-87 to Leu-93, Tyr-128 to Pro-141, Asp-204 to Gly-210.

[1348] The tissue distribution in reproductive tissue cancers, combined with the homology to a transcriptional repressor protein, indicates that the protein products of this gene are useful for treating tumors of the endometrium or epithelial tumors of the reproductive system. Moreover, the protein may also be useful as a contraceptive. Protein, as well as, antibodies directed against the protein may show utility as a tumor marker and/or immunotherapy targets for the above listed tissues.

[1349] Many polynucleotide sequences, such as EST sequences, are publicly available and accessible through sequence databases. Some of these sequences are related to SEQ ID NO:188 and may have been publicly available prior to conception of the present invention. Preferably, such related polynucleotides are specifically excluded from the scope of the present invention. To list every related sequence is cumbersome. Accordingly, preferably excluded from the present invention are one or more polynucleotides comprising a nucleotide sequence described by the general formula of a-b, where a is any integer between 1 to 1834 of SEQ ID NO:188, b is an integer of 15 to 1848, where both a and b correspond to the positions of nucleotide residues shown in SEQ ID NO:188, and where b is greater than or equal to a+14.

[1350] Features of Protein Encoded by Gene No: 179

[1351] In specific embodiments, polypeptides of the invention comprise, or alternatively consists of, an amino acid sequence selected from the group: MRILQLILLALATGLVGGETRIIKGFECKLHSQPWQAALFEKTRLLCGATLIAP RWLLTAAHCLKPRYIVHLGQHNLQKEEGCEQTRTATESFPHPGFNNSLPNKD HRNDIMLVKMASPVSITWAVRPLTLSSRCVTAGTSCSFPAGAARPDPSYACLT PCDAPTSPSLSTRSVRTPTPATSQTPWCVPACRKGA TPARVTPGALWSVTSL FKALSPGARIRVRSPESLVSTRKSANMWTGSRRR (SEQ ID NO:1149); ETRIIKGFECKLHSQPWQAALFEKTRLLCGATLIAPRWLLTAAHCLKPRYIVH LGQHNLQKEEGCEQTRTATESFPHPGFNNSLPNKDHRNDIMLVKMASPVSIT WAVRPLTLSSRCVTAGTSCSFPAGAARPDPSYACLTPCDAPTSPSLSTRSVRTP TPATSQTPWCVPACRKGARTPARVTPGALWSVTSLFKALSPGARIRVRSPESL VSTRKSANMWTGSRRR (SEQ ID NO:1150); and/or CKLHSQPWQAALFEKTRLLCGATLIAPRWLLTAAHCLKPRYIVHLGQHNLQK EEGCEQTRTATESFPHPGFNNS (SEQ ID NO:1151). Moreover, fragments and variants of these polypeptides (such as, for example, fragments as described herein, polypeptides at least 80%, 85%, 90%, 95%, 96%, 97%, 98%, or 99% identical to these polypeptides and polypeptides encoded by the polynucleotide which hybridizes, under stringent conditions, to the polynucleotide encoding these polypeptides) are encompassed by the invention. Antibodies that bind polypeptides of the invention are also encompassed by the invention. Polynucleotides encoding these polypeptides are also encompassed by the invention.

[1352] The translation product of this gene shares sequence homology with neuropsin, a novel serine protease, which is thought to be important in modulating extracellular signaling pathways in the brain. Owing to the structural similarity to other serine proteases, the protein products of this gene are expected to have serine protease activity which may be assayed by methods known in the art and described elsewhere herein. Moreover, this protein has been shown to also have homology to PSA (prostate specific antigen). PSA is a serum marker for prostate cancer and it is a member of the kallikrein family. The members of the kallikrein family are secreted serine proteases and some of them are good tissue specific markers. This new member of the kallikrein family has been detected twice in endometrial tumor cDNA library and therefore is a good candidate as a serum marker for endometrial tumor.

[1353] This gene is expressed primarily in endometrial tumor, and to a lesser extent, in colon cancer, benign hypertrophic prostate, and thymus.

[1354] Polynucleotides and polypeptides of the invention are useful as reagents for differential identification of the tissue(s) or cell type(s) present in a biological sample and for diagnosis of diseases and conditions which include, but are not limited to, reproductive, immune, or endocrine disorders, particularly cancers of the endometrium or colon and benign hypertrophy of the prostate. Similarly, polypeptides and antibodies directed to these polypeptides are useful in providing immunological probes for differential identification of the tissue(s) or cell type(s). For a number of disorders of the above tissues or cells, particularly of the urogenital or reproductive systems, expression of this gene at significantly higher or lower levels may be routinely detected in certain tissues or cell types (e.g., reproductive, immune, endocrine, gastrointestinal, and cancerous and wounded tissues) or bodily fluids (e.g., lymph, serum, seminal fluid, plasma, urine, synovial fluid and spinal fluid) or another tissue or cell sample taken from an individual having such a disorder, relative to the standard gene expression level, i.e., the expression level in healthy tissue or bodily fluid from an individual not having the disorder.

[1355] Predicted epitopes include those comprising a sequence shown in SEQ ID NO:427 as residues: Glu-27 to Trp-35, Leu-77 to Ala-89, Pro-96 to Asn-109, Ser-149 to Arg-156, Gln-172 to Ile-182, Glu-193 to Gly-204, Glu-245 to Asn-250.

[1356] The tissue distribution in proliferative reproductive tissues, combined with the homology to serine proteases indicates that the protein product of this gene is useful for diagnosing, treating, and/or preventing hyperproliferative disorders such as cancer of the endometrium or colon and hyperplasia of the prostate. Similarly, expression within cellular sources marked by proliferating cells indicates that this protein may play a role in the regulation of cellular division, and may show utility in the diagnosis and treatment of cancer and other proliferative disorders. Similarly, developmental tissues rely on decisions involving cell differentiation and/or apoptosis in pattern formation. Thus this protein may also be involved in apoptosis or tissue differentiation and could again be useful in cancer therapy. Protein, as well as, antibodies directed against the protein may show utility as a tumor marker and/or immunotherapy targets for the above listed tissues.

[1357] Many polynucleotide sequences, such as EST sequences, are publicly available and accessible through sequence databases. Some of these sequences are related to SEQ ID NO:189 and may have been publicly available prior to conception of the present invention. Preferably, such related polynucleotides are specifically excluded from the scope of the present invention. To list every related sequence is cumbersome. Accordingly, preferably excluded from the present invention are one or more polynucleotides comprising a nucleotide sequence described by the general formula of a-b, where a is any integer between 1 to 1278 of SEQ ID NO:189, b is an integer of 15 to 1292, where both a and b correspond to the positions of nucleotide residues shown in SEQ ID NO:189, and where b is greater than or equal to a+14.

[1358] Features of Protein Encoded by Gene No: 180

[1359] In specific embodiments, polypeptides of the invention comprise, or alternatively consists of, an amino acid sequence selected from the group: VLQGRYFSPILEMRRLRPEGXXNLPGGSRAQKEPRQDLTLVLWPHCPHFAMT RSYVPTKQCMVQGSFYCIFIFKGPVQNWC (SEQ ID NO:1152), and/or CPRRRT CVRVEKSRPFQCQLHSIS (SEQ ID NO:1153). Moreover, fragments and variants of these polypeptides (such as, for example, fragments as described herein, polypeptides at least 80%, 85%, 90%, 95%, 96%, 97%, 98%, or 99% identical to these polypeptides and polypeptides encoded by the polynucleotide which hybridizes, under stringent conditions, to the polynucleotide encoding these polypeptides) are encompassed by the invention. Antibodies that bind polypeptides of the invention are also encompassed by the invention. Polynucleotides encoding these polypeptides are also encompassed by the invention.

[1360] This gene is expressed primarily in fetal brain.

[1361] Polynucleotides and polypeptides of the invention are useful as reagents for differential identification of the tissue(s) or cell type(s) present in a biological sample and for diagnosis of diseases and conditions which include, but are not limited to, neural disorders, particularly neurodegenerative conditions, in addition to identifying and expanding stem cells in the CNS. Similarly, polypeptides and antibodies directed to these polypeptides are useful in providing immunological probes for differential identification of the tissue(s) or cell type(s). For a number of disorders of the above tissues or cells, particularly of the nervous system, expression of this gene at significantly higher or lower levels may be routinely detected in certain tissues or cell types (e.g., neural, developmental, and cancerous and wounded tissues) or bodily fluids (e.g., lymph, amniotic fluid, serum, plasma, urine, synovial fluid and spinal fluid) or another tissue or cell sample taken from an individual having such a disorder, relative to the standard gene expression level, i.e., the expression level in healthy tissue or bodily fluid from an individual not having the disorder.

[1362] Predicted epitopes include those comprising a sequence shown in SEQ ID NO:428 as residues: Met-1 to Lys-9, Glu-26 to Lys-37, Lys-39 to Lys-48.

[1363] The tissue distribution in fetal brain indicates that the protein products of this gene are useful for detecting and expanding stem cell populations in the (or of the) central nervous system. Moreover, the protein product of this gene is useful for the detection/treatment of neurodegenerative disease states, behavioral disorders, or inflammatory conditions which include, but are not limited to Alzheimer's Disease, Parkinson's Disease, Huntington's Disease, Tourette's Syndrome, meningitis, encephalitis, demyelinating diseases, peripheral neuropathies, neoplasia, trauma, congenital malformations, spinal cord injuries, ischemia and infarction, aneurysms, hemorrhages, schizophrenia, mania, dementia, paranoia, obsessive compulsive disorder, depression, panic disorder, learning disabilities, ALS, psychoses, autism, and altered behaviors, including disorders in feeding, sleep patterns, balance, and perception. In addition, elevated expression of this gene product in regions of the brain indicates that it plays a role in normal neural function. Potentially, this gene product is involved in synapse formation, neurotransmission, learning, cognition, homeostasis, or neuronal differentiation or survival. Protein, as well as, antibodies directed against the protein may show utility as a tumor marker and/or immunotherapy targets for the above listed tissues.

[1364] Many polynucleotide sequences, such as EST sequences, are publicly available and accessible through sequence databases. Some of these sequences are related to SEQ ID NO:190 and may have been publicly available prior to conception of the present invention. Preferably, such related polynucleotides are specifically excluded from the scope of the present invention. To list every related sequence is cumbersome. Accordingly, preferably excluded from the present invention are one or more polynucleotides comprising a nucleotide sequence described by the general formula of a-b, where a is any integer between 1 to 892 of SEQ ID NO:190, b is an integer of 15 to 906, where both a and b correspond to the positions of nucleotide residues shown in SEQ ID NO:190, and where b is greater than or equal to a+14.

[1365] Features of Protein Encoded by Gene No: 181

[1366] In specific embodiments, polypeptides of the invention comprise, or alternatively consist of, the following amino acid sequences: PKEPGVPE (SEQ ID NO:1154), LQLKPRDPFSTLGPNAVLSPQRLVLETLSKLSIQDNNVDLILATPPFSRLEKLY STMVRFLSDRKNPVCRRWLWYCWPTWLRGTAWQIVPLQCRRAVSATSWAS (SEQ ID NO:1155), RDPFSTLGPNAVLSPQRLVLETLSKLS (SEQ ID NO:1156), EVISGLFIQSRRRERGQGVVGSHMILWGKSLFFFSPQRLTKNIFKNYSLLLTQR FLFPCETLLLQYVYSIRCTVQYMKGSTLYCTGLSSEQGLFTTANFLAPARL (SEQ ID NO:1157), and/or IRCTVQYMKGSTLYCTGLSSEQG (SEQ ID NO:1158). Moreover, fragments and variants of these polypeptides (such as, for example, fragments as described herein, polypeptides at least 80%, 85%, 90%, 95%, 96%, 97%, 98%, or 99% identical to these polypeptides and polypeptides encoded by the polynucleotide which hybridizes, under stringent conditions, to the polynucleotide encoding these polypeptides) are encompassed by the invention. Antibodies that bind polypeptides of the invention are also encompassed by the invention. Polynucleotides encoding these polypeptides are also encompassed by the invention.

[1367] This gene is expressed primarily in early stage human brain, fetal liver/spleen, and stromal cells.

[1368] Polynucleotides and polypeptides of the invention are useful as reagents for differential identification of the tissue(s) or cell type(s) present in a biological sample and for diagnosis of diseases and conditions which include, but are not limited to, developmental abnormalities, neural, immune, or hematopoietic disorders. Similarly, polypeptides and antibodies directed to these polypeptides are useful in providing immunological probes for differential identification of the tissue(s) or cell type(s). For a number of disorders of the above tissues or cells, particularly of the central nervous system, expression of this gene at significantly higher or lower levels may be routinely detected in certain tissues or cell types (e.g., developmental, neural, immune, hematopoietic, and cancerous and wounded tissues) or bodily fluids (e.g., lymph, amniotic fluid, serum, plasma, urine, synovial fluid and spinal fluid) or another tissue or cell sample taken from an individual having such a disorder, relative to the standard gene expression level, i.e., the expression level in healthy tissue or bodily fluid from an individual not having the disorder.

[1369] Predicted epitopes include those comprising a sequence shown in SEQ ID NO:429 as residues: Gln-42 to Gln-47, Gln-54 to Pro-60.

[1370] The tissue distribution in embryonic brain and fetal liver indicates that the protein products of this gene play a role in the development of the central nervous and hematopoietic systems. Therefore this gene and its products are useful for diagnosing or treating developmental abnormalities of the central nervous system. Moreover, the protein product of this gene is useful for the treatment and diagnosis of hematopoetic related disorders such as anemia, pancytopenia, leukopenia, thrombocytopenia or leukemia since stromal cells are important in the production of cells of hematopoietic lineages. The uses include bone marrow cell ex vivo culture, bone marrow transplantation, bone marrow reconstitution, radiotherapy or chemotherapy of neoplasia. The gene product may also be involved in lymphopoiesis, therefore, it can be used in immune disorders such as infection, inflammation, allergy, immunodeficiency etc. In addition, this gene product may have commercial utility in the expansion of stem cells and committed progenitors of various blood lineages, and in the differentiation and/or proliferation of various cell types. Protein, as well as, antibodies directed against the protein may show utility as a tumor marker and/or immunotherapy targets for the above listed tissues.

[1371] Many polynucleotide sequences, such as EST sequences, are publicly available and accessible through sequence databases. Some of these sequences are related to SEQ ID NO:191 and may have been publicly available prior to conception of the present invention. Preferably, such related polynucleotides are specifically excluded from the scope of the present invention. To list every related sequence is cumbersome. Accordingly, preferably excluded from the present invention are one or more polynucleotides comprising a nucleotide sequence described by the general formula of a-b, where a is any integer between 1 to 1927 of SEQ ID NO:191, b is an integer of 15 to 1941, where both a and b correspond to the positions of nucleotide residues shown in SEQ ID NO:191, and where b is greater than or equal to a+14.

[1372] Features of Protein Encoded by Gene No: 182

[1373] In specific embodiments, polypeptides of the invention comprise, or alternatively consists of, an amino acid sequence selected from the group: MPIIDQVNPELHDFMQSAEVGTIFALSWLITWFGHVLSDFRHVVRLYDFFLAC HPLMPIYFAAVIVLYREQEVLDCDCDMASVHHLLSQIPQDLPYETLISRXETFL FSFPHPNLLGRPLPNSKLRGRQPLLSKTLSWHQPSRGLIWCCGSGXRGLLRPE DRTKDVLTKPRTNRFVKLAVMGLTVALGAAALAVVKSALEWAPKFQLQLFP (SEQ ID NO:1159; “ORF-1”); or CPEFFIPATLPCPFVFAFTSEASSRAYLTQRGPGGLAQNLMPLPVGFWMGSLP PPWCWRKWVSEACSCFC (SEQ ID NO:1160; “ORF.-2”). Moreover, fragments and variants of these polypeptides (such as, for example, fragments as described herein, polypeptides at least 80%, 85%, 90%, 95%, 96%, 97%, 98%, or 99% identical to these polypeptides and polypeptides encoded by the polynucleotide which hybridizes, under stringent conditions, to the polynucleotide encoding these polypeptides) are encompassed by the invention. Antibodies that bind polypeptides of the invention are also encompassed by the invention. Polynucleotides encoding these polypeptides are also encompassed by the invention.

[1374] ORF-2 is structurally similar to various TGF-beta family members. Thus, this polypeptide is expected to have a variety of activities in the modulation of cell growth and proliferation. In specific embodiments, polypeptides of the invention comprise, or alternatively consists of, the following amino acid sequence: CRQAGAVRGHPMFQFTFYGVTXRFPVTRAAQAQQVAKAAASFRNPLPPTPG RWQRAHPKAHWERHKILCQAPRSPLCQVGSATGL (SEQ ID NO:1161), HILNYLMPIIDQVNPELHDFMQSAEVGTIFALSWLITWFGHVLSDFRHVVRLY DFFLACHPLMPIYFAAVIVLYREQEVLDCDCDMASVHHLLSQIPQDLPYETLIS RXETFLFSFPHPNLLGRPLPNSKLRGRQPLLSKTLSWHQPSRGLIWCCGSGXR GLLRPEDRTKDVLTKPRTNRFVKLAVMGLTVALGAAALAVVKSALEWAPKF QLQLFP (SEQ ID NO:1162), AEVGTIFALSWLITWFGHVLSDFRHVVRLYD (SEQ ID NO:1163), and/or VLTKPRTNRFVKLAVMGLTVALGAAALAVVKSA (SEQ ID NO:1164). Moreover, fragments and variants of these polypeptides (such as, for example, fragments as described herein, polypeptides at least 80%, 85%, 90%, 95%, 96%, 97%, 98%, or 99% identical to these polypeptides and polypeptides encoded by the polynucleotide which hybridizes, under stringent conditions, to the polynucleotide encoding these polypeptides) are encompassed by the invention. Antibodies that bind polypeptides of the invention are also encompassed by the invention. Polynucleotides encoding these polypeptides are also encompassed by the invention.

[1375] The gene encoding the disclosed cDNA is believed to reside on chromosome 20. Accordingly, polynucleotides related to this invention are useful as a marker in linkage analysis for chromosome 20.

[1376] This gene is expressed primarily in osteoclastoma, microvascular endothelium, and bone marrow derived cell lines.

[1377] Polynucleotides and polypeptides of the invention are useful as reagents for differential identification of the tissue(s) or cell type(s) present in a biological sample and for diagnosis of diseases and conditions which include, but are not limited to, skeletal, vascular, or hematological diseases, particularly those involving aberrant proliferation of stem cells. Similarly, polypeptides and antibodies directed to these polypeptides are useful in providing immunological probes for differential identification of the tissue(s) or cell type(s). For a number of disorders of the above tissues or cells, particularly of the immune system, expression of this gene at significantly higher or lower levels may be routinely detected in certain tissues or cell types (e.g., skeletal, vascular, immune, hematological, and cancerous and wounded tissues) or bodily fluids (e.g., lymph, serum, plasma, urine, synovial fluid and spinal fluid) or another tissue or cell sample taken from an individual having such a disorder, relative to the standard gene expression level, i.e., the expression level in healthy tissue or bodily fluid from an individual not having the disorder.

[1378] Predicted epitopes include those comprising a sequence shown in SEQ ID NO:430 as residues: Ser-33 to Ala-39.

[1379] The tissue distribution in bone marrow and endothelial cells indicates that the protein products of this gene is useful for treating disorders of the progenitors of the immune system. Applications include in vivo expansion of progenitor cells, ex vivo expansion of progenitor cells, or the treatment of tumors of the circulatory system, such as lymphomas. Moreover, the protein product of this gene may also show utility in either the enhancement or inhibition of immune cell localization or targeting at sites of inflammation or injury. The protein product of this gene may be useful in the treatment, detection, and/or prevention of a variety of vascular disorders, which include, but are not limited to microvascular disease, embolism, aneurysm, atherosclerosis, or stroke. Protein, as well as, antibodies directed against the protein may show utility as a tumor marker and/or immunotherapy targets for the above listed tissues.

[1380] Many polynucleotide sequences, such as EST sequences, are publicly available and accessible through sequence databases. Some of these sequences are related to SEQ ID NO:192 and may have been publicly available prior to conception of the present invention. Preferably, such related polynucleotides are specifically excluded from the scope of the present invention. To list every related sequence is cumbersome. Accordingly, preferably excluded from the present invention are one or more polynucleotides comprising a nucleotide sequence described by the general formula of a-b, where a is any integer between 1 to 2104 of SEQ ID NO:192, b is an integer of 15 to 2118, where both a and b correspond to the positions of nucleotide residues shown in SEQ ID NO:192, and where b is greater than or equal to a+14.

[1381] Features of Protein Encoded by Gene No: 183

[1382] In specific embodiments, polypeptides of the invention comprise, or alternatively consists of, an amino acid sequence selected from the group: GFGSVSAAGRRSGGTWQPVQ (SEQ ID NO:1165), PGGLAVG SRW WSRSLT (SEQ ID NO:1166), LEPSRQRRPRRRGGTSRPETDQRAKCWRQL (SEQ ID NO:1167), VCLRCQNRMEN (SEQ ID NO:1168), MAACTARRPGRGQPLVVPVADXGPVAKAALCAAXAGAFSPASTTTTRRHLS SRNRPEGKVLETVGVFEVPKQNGKYETGQLFLHSIFGYRGVVLFPWQARLXD RDVASAAPEKAENPAGHGSKEVKGKTHTYYQVLIDARDCPHISQRSQTEAVT FLANHDDSRALYAIPGLDYVSHEDILPYTSTDQVPIQHELFERFLLYDQTKAPP FVARETLRAWQEKNHPWLELSDVHRETTENIRVTVIPFYMGMREAQNSHVY WWRYCIRLENLDSDVVQLRERHWRIFSLSGTLETVRGRGVVGREPVLSKEQP AFQYSSHVSLQASSGHMWGTFRFERPDGSHFDVRIPPFSLESNKDEKTPPSGL HW (SEQ ID NO:1169), MAACTARRPGRGQPLVVPVADXGPVAKAALCAA (SEQ ID NO:1170), MAACTARRPGRGQPLVVPVADXGPVAKAALCAA (SEQ ID NO:1171), MAACTARRPGRGQPLVVPVADXGPVAKAALCAA (SEQ ID NO:1172), MAACTARRPGRGQPLVVPVADXGPVAKAALCAA (SEQ ID NO:1173), MAACTARRPGRGQPLVVPVADXGPVAKAALCAA (SEQ ID NO:1174), VLETVGVFEVPKQNGKYETGQLFLHSIFGYRGVVL (SEQ ID NO:1175), GLDYVSHEDILPYTST (SEQ ID NO:1176), DVHRETTENIRVTVIPFYM (SEQ ID NO:1177), WWRYCIRLENLDSDVVQLRER (SEQ ID NO:1178), PAFQYSSHVSLQASSGHMWGTFRFER (SEQ ID NO:1179), RLPSHKRRCFCLVIQKKSFKEFMLDGNLISGGVGEDVFMADIVQAWDGIEGP TVIMVSQEGHSFCLRSLRYMWAVTSINQHLIVSVSFAFHLLGAMASRVLCFF WSCRSHIPVXQSGLPGKQDDTSVAKNAMKEKLPGLIFSILFWHLKHTNCLQH FALWSVSGREVPPRRRGRRWREGSSXGRAQSGLGHRAXVSDRDHQRLPTAR PPGCTGCHVPPERRPAADTEPNP (SEQ ID NO:1180), KEFMLDGNLISGGVGEDVFMADIVQAWDGIE (SEQ ID NO:1181), AVTSINQHLIVSVSFAFHLLGAMASRVLC (SEQ ID NO:1182), and/or TARPPGCTGCHVPPERRPAA (SEQ ID NO:1183). Moreover, fragments and variants of these polypeptides (such as, for example, fragments as described herein, polypeptides at least 80%, 85%, 90%, 95%, 96%, 97%, 98%, or 99% identical to these polypeptides and polypeptides encoded by the polynucleotide which hybridizes, under stringent conditions, to the polynucleotide encoding these polypeptides) are encompassed by the invention. Antibodies that bind polypeptides of the invention are also encompassed by the invention. Polynucleotides encoding these polypeptides are also encompassed by the invention.

[1383] The gene encoding the disclosed cDNA is believed to reside on chromosome 17. Accordingly, polynucleotides related to this invention are useful as a marker in linkage analysis for chromosome 17.

[1384] This gene is expressed primarily in gall bladder, prostate, and fetal brain, and to a lesser extent, in tumor and fetal tissues.

[1385] Polynucleotides and polypeptides of the invention are useful as reagents for differential identification of the tissue(s) or cell type(s) present in a biological sample and for diagnosis of diseases and conditions which include, but are not limited to, gastrointestinal, reproductive, neural, or growth related disorders such as cancers. Similarly, polypeptides and antibodies directed to these polypeptides are useful in providing immunological probes for differential identification of the tissue(s) or cell type(s). For a number of disorders of the above tissues or cells, particularly of the prostate, gall bladder, and fetal brain, expression of this gene at significantly higher or lower levels may be routinely detected in certain tissues or cell types (e.g., gastrointestinal, reproductive, neural, developmental, and cancerous and wounded tissues) or bodily fluids (e.g., lymph, amniotic fluid, bile, serum, plasma, urine, synovial fluid and spinal fluid) or another tissue or cell sample taken from an individual having such a disorder, relative to the standard gene expression level, i.e., the expression level in healthy tissue or bodily fluid from an individual not having the disorder.

[1386] The tissue distribution in fetal brain and tumor tissues indicates that the protein product of this gene is useful for the diagnosis and treatment of growth-related disorders, such as cancers. Moreover, the protein product of this gene is useful for the detection/treatment of neurodegenerative disease states, behavioral disorders, or inflammatory conditions which include, but are not limited to Alzheimer's Disease, Parkinson's Disease, Huntington's Disease, Tourette's Syndrome, meningitis, encephalitis, demyelinating diseases, peripheral neuropathies, neoplasia, trauma, congenital malformations, spinal cord injuries, ischemia and infarction, aneurysms, hemorrhages, schizophrenia, mania, dementia, paranoia, obsessive compulsive disorder, depression, panic disorder, learning disabilities, ALS, psychoses, autism, and altered behaviors, including disorders in feeding, sleep patterns, balance, and perception. In addition, elevated expression of this gene product in regions of the brain indicates that it plays a role in normal neural function. Potentially, this gene product is involved in synapse formation, neurotransmission, learning, cognition, homeostasis, or neuronal differentiation or survival, in addition to metabolic, or reproductive disorders. Protein, as well as, antibodies directed against the protein may show utility as a tumor marker and/or immunotherapy targets for the above listed tissues.

[1387] Many polynucleotide sequences, such as EST sequences, are publicly available and accessible through sequence databases. Some of these sequences are related to SEQ ID NO:193 and may have been publicly available prior to conception of the present invention. Preferably, such related polynucleotides are specifically excluded from the scope of the present invention. To list every related sequence is cumbersome. Accordingly, preferably excluded from the present invention are one or more polynucleotides comprising a nucleotide sequence described by the general formula of a-b, where a is any integer between 1 to 1524 of SEQ ID NO:193, b is an integer of 15 to 1538, where both a and b correspond to the positions of nucleotide residues shown in SEQ ID NO:193, and where b is greater than or equal to a+14.

[1388] Features of Protein Encoded by Gene No: 184

[1389] In specific embodiments, polypeptides of the invention comprise, or alternatively consists of, an amino acid sequence selected from the group: SLCCPEGAEGC (SEQ ID NO:1184), QLKKTHYDRPCP (SEQ ID NO:1185), QLKKTHYDRPCP (SEQ ID NO:1186), MNRPCPFCLWKVFPLLLLLHEELFPLPVP (SEQ ID NO:1187), and/or KEKTFTPRNSLCCPEGAEGCIAGGDLQLKKTHY (SEQ ID NO:1188). Moreover, fragments and variants of these polypeptides (such as, for example, fragments as described herein, polypeptides at least 80%, 85%, 90%, 95%, 96%, 97%, 98%, or 99% identical to these polypeptides and polypeptides encoded by the polynucleotide which hybridizes, under stringent conditions, to the polynucleotide encoding these polypeptides) are encompassed by the invention. Antibodies that bind polypeptides of the invention are also encompassed by the invention. Polynucleotides encoding these polypeptides are also encompassed by the invention.

[1390] This gene is expressed primarily in stromal cell, tonsil, and glioblastoma.

[1391] Polynucleotides and polypeptides of the invention are useful as reagents for differential identification of the tissue(s) or cell type(s) present in a biological sample and for diagnosis of diseases and conditions which include, but are not limited to, hematopoietic, immune and inflammatory disorders, in addition to neural disorders, such as glioblastoma. Similarly, polypeptides and antibodies directed to these polypeptides are useful in providing immunological probes for differential identification of the tissue(s) or cell type(s). For a number of disorders of the above tissues or cells, particularly of the stromal cells, tonsil, and glioblastoma expression of this gene at significantly higher or lower levels may be routinely detected in certain tissues or cell types (e.g., immune, hematopoietic, neural, and cancerous and wounded tissues) or bodily fluids (e.g., lymph, serum, plasma, urine, synovial fluid and spinal fluid) or another tissue or cell sample taken from an individual having such a disorder, relative to the standard gene expression level, i.e., the expression level in healthy tissue or bodily fluid from an individual not having the disorder. Additionally, it is believed that the product of this gene regulates pancreatic cell differentiation into beta cells. Accordingly, polynucleotides and polypeptides of the invention are useful in the treatment of insulin-dependent diabetes mellitus and associated conditions e.g. pancreatic hypofunction and the prevention, as well as the treatment of undifferentiated type pancreatic cancers.

[1392] Predicted epitopes include those comprising a sequence shown in SEQ ID NO:432 as residues: Pro-27 to Ala-32.

[1393] The tissue distribution in stromal cells and tonsils indicates that the protein product of this gene is useful for diagnosis and treatment of immune and inflammatory disorders and glioblastoma. Similarly, the protein product of this gene is useful for the treatment and diagnosis of hematopoetic related disorders such as anemia, pancytopenia, leukopenia, thrombocytopenia or leukemia since stromal cells are important in the production of cells of hematopoietic lineages. The uses include bone marrow cell ex vivo culture, bone marrow transplantation, bone marrow reconstitution, radiotherapy or chemotherapy of neoplasia. The gene product may also be involved in lymphopoiesis, therefore, it can be used in immune disorders such as infection, inflammation, allergy, immunodeficiency etc. In addition, this gene product may have commercial utility in the expansion of stem cells and committed progenitors of various blood lineages, and in the differentiation and/or proliferation of various cell types. Protein, as well as, antibodies directed against the protein may show utility as a tumor marker and/or immunotherapy targets for the above listed tissues.

[1394] Many polynucleotide sequences, such as EST sequences, are publicly available and accessible through sequence databases. Some of these sequences are related to SEQ ID NO:194 and may have been publicly available prior to conception of the present invention. Preferably, such related polynucleotides are specifically excluded from the scope of the present invention. To list every related sequence is cumbersome. Accordingly, preferably excluded from the present invention are one or more polynucleotides comprising a nucleotide sequence described by the general formula of a-b, where a is any integer between 1 to 1084 of SEQ ID NO:194, b is an integer of 15 to 1098, where both a and b correspond to the positions of nucleotide residues shown in SEQ ID NO:194, and where b is greater than or equal to a+14.

[1395] Features of Protein Encoded by Gene No: 185

[1396] This gene is expressed primarily in hepatocellular carcinoma.

[1397] Polynucleotides and polypeptides of the invention are useful as reagents for differential identification of the tissue(s) or cell type(s) present in a biological sample and for diagnosis of diseases and conditions which include, but are not limited to, hepatic or metabolic diseases. Similarly, polypeptides and antibodies directed to these polypeptides are useful in providing immunological probes for differential identification of the tissue(s) or cell type(s). For a number of disorders of the above tissues or cells, particularly of the liver, expression of this gene at significantly higher or lower levels may be routinely detected in certain tissues or cell types (e.g., hepatic, metabolic, immune, hematopoietic, and cancerous and wounded tissues) or bodily fluids (e.g., lymph, serum, bile, plasma, urine, synovial fluid and spinal fluid) or another tissue or cell sample taken from an individual having such a disorder, relative to the standard gene expression level, i.e., the expression level in healthy tissue or bodily fluid from an individual not having the disorder.

[1398] Predicted epitopes include those comprising a sequence shown in SEQ ID NO:433 as residues: Gly-32 to Lys-39.

[1399] The tissue distribution in hepatocellular carcinoma tissue indicates that the protein product of this gene is useful for diagnosis and treatment of liver diseases. Moreover, the protein product of this gene is useful for the detection and treatment of liver disorders and cancers (e.g. hepatoblastoma, jaundice, hepatitis, liver metabolic diseases and conditions that are attributable to the differentiation of hepatocyte progenitor cells). In addition the protein may have a useful role in treating, detecting, or preventing developmental abnormalities, fetal deficiencies, pre-natal disorders and various would-healing models and/or tissue trauma. Protein, as well as, antibodies directed against the protein may show utility as a tumor marker and/or immunotherapy targets for the above listed tissues.

[1400] Many polynucleotide sequences, such as EST sequences, are publicly available and accessible through sequence databases. Some of these sequences are related to SEQ ID NO:195 and may have been publicly available prior to conception of the present invention. Preferably, such related polynucleotides are specifically excluded from the scope of the present invention. To list every related sequence is cumbersome. Accordingly, preferably excluded from the present invention are one or more polynucleotides comprising a nucleotide sequence described by the general formula of a-b, where a is any integer between 1 to 987 of SEQ ID NO:195, b is an integer of 15 to 1001, where both a and b correspond to the positions of nucleotide residues shown in SEQ ID NO:195, and where b is greater than or equal to a+14.

[1401] Features of Protein Encoded by Gene No: 186

[1402] This gene is expressed primarily in hippocampus.

[1403] Polynucleotides and polypeptides of the invention are useful as reagents for differential identification of the tissue(s) or cell type(s) present in a biological sample and for diagnosis of diseases and conditions which include, but are not limited to, neuronal or endocrine disorders, particularly behavioral and mood disorders. Similarly, polypeptides and antibodies directed to these polypeptides are useful in providing immunological probes for differential identification of the tissue(s) or cell type(s). For a number of disorders of the above tissues or cells, particularly of the hippocampus, expression of this gene at significantly higher or lower levels may be routinely detected in certain tissues or cell types (e.g., neural, endocrine, and cancerous and wounded tissues) or bodily fluids (e.g., lymph, serum, plasma, urine, synovial fluid and spinal fluid) or another tissue or cell sample taken from an individual having such a disorder, relative to the standard gene expression level, i.e., the expression level in healthy tissue or bodily fluid from an individual not having the disorder.

[1404] Predicted epitopes include those comprising a sequence shown in SEQ ID NO:434 as residues: Ser-14 to Tyr-20.

[1405] The tissue distribution in hippocampus indicates that the protein product of this gene is useful for the diagnosis and treatment of neuronal disorders. Moreover, the protein product of this gene is useful for the detection/treatment of neurodegenerative disease states, behavioral disorders, or inflammatory conditions which include, but are not limited to Alzheimer's Disease, Parkinson's Disease, Huntington's Disease, Tourette's Syndrome, meningitis, encephalitis, demyelinating diseases, peripheral neuropathies, neoplasia, trauma, congenital malformations, spinal cord injuries, ischemia and infarction, aneurysms, hemorrhages, schizophrenia, mania, dementia, paranoia, obsessive compulsive disorder, depression, panic disorder, learning disabilities, ALS, psychoses, autism, and altered behaviors, including disorders in feeding, sleep patterns, balance, and perception. In addition, elevated expression of this gene product in regions of the brain indicates that it plays a role in normal neural function. Potentially, this gene product is involved in synapse formation, neurotransmission, learning, cognition, homeostasis, or neuronal differentiation or survival. Protein, as well as, antibodies directed against the protein may show utility as a tumor marker and/or immunotherapy targets for the above listed tissues.

[1406] Many polynucleotide sequences, such as EST sequences, are publicly available and accessible through sequence databases. Some of these sequences are related to SEQ ID NO:196 and may have been publicly available prior to conception of the present invention. Preferably, such related polynucleotides are specifically excluded from the scope of the present invention. To list every related sequence is cumbersome. Accordingly, preferably excluded from the present invention are one or more polynucleotides comprising a nucleotide sequence described by the general formula of a-b, where a is any integer between 1 to 1444 of SEQ ID NO:196, b is an integer of 15 to 1458, where both a and b correspond to the positions of nucleotide residues shown in SEQ ID NO:196, and where b is greater than or equal to a+14.

[1407] Features of Protein Encoded by Gene No: 187

[1408] This gene is expressed primarily in bone cancer and hippocampus, and to a lesser extent, in osteoclastoma.

[1409] Polynucleotides and polypeptides of the invention are useful as reagents for differential identification of the tissue(s) or cell type(s) present in a biological sample and for diagnosis of diseases and conditions which include, but are not limited to, bone-related disorders and neuronal diseases. Similarly, polypeptides and antibodies directed to these polypeptides are useful in providing immunological probes for differential identification of the tissue(s) or cell type(s). For a number of disorders of the above tissues or cells, particularly of the bone, osteoclast, and hippocampus, expression of this gene at significantly higher or lower levels may be routinely detected in certain tissues or cell types (e.g., neural, skeletal, and cancerous and wounded tissues) or bodily fluids (e.g., lymph, serum, plasma, urine, synovial fluid and spinal fluid) or another tissue or cell sample taken from an individual having such a disorder, relative to the standard gene expression level, i.e., the expression level in healthy tissue or bodily fluid from an individual not having the disorder.

[1410] The tissue distribution in hippocampus and skeletal tissues indicates that the protein product of this gene is useful for diagnosis and treatment of bone-related disorders and neuronal diseases. Similarly, this gene product is useful in the detection and treatment of disorders and conditions affecting the skeletal system, in particular osteoporosis, bone cancer, as well as, disorders afflicting connective tissues (e.g. arthritis, trauma, tendonitis, chrondomalacia and inflammation), such as in the diagnosis or treatment of various autoimmune disorders such as rheumatoid arthritis, lupus, scleroderma, and dermatomyositis as well as dwarfism, spinal deformation, and specific joint abnormalities as well as chondrodysplasias (i.e. spondyloepiphyseal dysplasia congenita, familial osteoarthritis, Atelosteogenesis type II, metaphyseal chondrodysplasia type Schmid). Alternatively, the protein product of this gene is useful for the detection/treatment of neurodegenerative disease states, behavioral disorders, or inflammatory conditions. Protein, as well as, antibodies directed against the protein may show utility as a tumor marker and/or immunotherapy targets for the above listed tissues.

[1411] Many polynucleotide sequences, such as EST sequences, are publicly available and accessible through sequence databases. Some of these sequences are related to SEQ ID NO:197 and may have been publicly available prior to conception of the present invention. Preferably, such related polynucleotides are specifically excluded from the scope of the present invention. To list every related sequence is cumbersome. Accordingly, preferably excluded from the present invention are one or more polynucleotides comprising a nucleotide sequence described by the general formula of a-b, where a is any integer between 1 to 1268 of SEQ ID NO:197, b is an integer of 15 to 1282, where both a and b correspond to the positions of nucleotide residues shown in SEQ ID NO:197, and where b is greater than or equal to a+14.

[1412] Features of Protein Encoded by Gene No: 188

[1413] The gene encoding the disclosed cDNA is thought to reside on chromosome 4. Accordingly, polynucleotides related to this invention are useful as a marker in linkage analysis for chromosome 4.

[1414] This gene is expressed primarily in neuronal tissues such as hippocampus, spinal cord, and hypothalamus.

[1415] Polynucleotides and polypeptides of the invention are useful as reagents for differential identification of the tissue(s) or cell type(s) present in a biological sample and for diagnosis of diseases and conditions which include, but are not limited to, neuronal diseases. Similarly, polypeptides and antibodies directed to these polypeptides are useful in providing immunological probes for differential identification of the tissue(s) or cell type(s). For a number of disorders of the above tissues or cells, particularly of the neuronal tissues, expression of this gene at significantly higher or lower levels may be routinely detected in certain tissues or cell types (e.g. neuronal, cancerous and wounded tissues) or bodily fluids (e.g., lymph, serum, plasma, urine, synovial fluid and spinal fluid) or another tissue or cell sample taken from an individual having such a disorder, relative to the standard gene expression level, i.e., the expression level in healthy tissue or bodily fluid from an individual not having the disorder.

[1416] The tissue distribution in neuronal tissues indicates that the protein product of this gene is useful for diagnosis and treatment of neuronal disorders, such as Alzheimer's Disease, Parkinson's Disease, Huntington's Disease, Tourette's Syndrome, schizophrenia, mania, dementia, paranoia, obsessive compulsive disorder, panic disorder, learning disabilities, ALS, psychoses, autism, and altered behaviors, including disorders in feeding, sleep patterns, balance, and perception. In addition, the gene or gene product may also play a role in the treatment and/or detection of developmental disorders associated with the developing embryo, or sexually-linked disorders. Protein, as well as, antibodies directed against the protein may show utility as a tumor marker and/or immunotherapy targets for the above listed tissues.

[1417] Many polynucleotide sequences, such as EST sequences, are publicly available and accessible through sequence databases. Some of these sequences are related to SEQ ID NO:198 and may have been publicly available prior to conception of the present invention. Preferably, such related polynucleotides are specifically excluded from the scope of the present invention. To list every related sequence is cumbersome. Accordingly, preferably excluded from the present invention are one or more polynucleotides comprising a nucleotide sequence described by the general formula of a-b, where a is any integer between 1 to 937 of SEQ ID NO:198, b is an integer of 15 to 951, where both a and b correspond to the positions of nucleotide residues shown in SEQ ID NO:198, and where b is greater than or equal to a+14.

[1418] Features of Protein Encoded by Gene No: 189

[1419] The gene encoding the disclosed cDNA is thought to reside on chromosome 10. Accordingly, polynucleotides related to this invention are useful as a marker in linkage analysis for chromosome 10.

[1420] This gene is expressed primarily in neuronal tissues and immune tissues.

[1421] Polynucleotides and polypeptides of the invention are useful as reagents for differential identification of the tissue(s) or cell type(s) present in a biological sample and for diagnosis of diseases and conditions which include, but are not limited to, neuronal and immune-related disorders. Similarly, polypeptides and antibodies directed to these polypeptides are useful in providing immunological probes for differential identification of the tissue(s) or cell type(s). For a number of disorders of the above tissues or cells, particularly of the neuronal and immune-related tissues, expression of this gene at significantly higher or lower levels may be routinely detected in certain tissues or cell types (e.g. neuronal, immune, cancerous and wounded tissues) or bodily fluids (e.g., lymph, serum, plasma, urine, synovial fluid and spinal fluid) or another tissue or cell sample taken from an individual having such a disorder, relative to the standard gene expression level, i.e., the expression level in healthy tissue or bodily fluid from an individual not having the disorder.

[1422] Predicted epitopes include those comprising a sequence shown in SEQ ID NO:437 as residues: Pro-19 to Asp-25.

[1423] The tissue distribution neuronal and immune tissues indicates that the protein product of this gene is useful for the diagnosis and treatment of neuronal and immune-related disorders. Furthermore, the tissue distribution indicates that the protein product of this gene is useful for the detection/treatment of neurodegenerative disease states, neuronal disorders, and behavioral disorders such as Alzheimer's Disease, Parkinson's Disease, Huntington's Disease, Tourette's Syndrome, schizophrenia, mania, dementia, paranoia, obsessive compulsive disorder, panic disorder, learning disabilities, ALS, psychoses, autism, and altered behaviors, including disorders in feeding, sleep patterns, balance, and perception. In addition, the gene or gene product may also play a role in the treatment and/or detection of developmental disorders associated with the developing embryo, or sexually-linked disorders. Additionally, this gene product may be involved in the regulation of cytokine production, antigen presentation, or other processes that may also suggest a usefulness in the treatment of cancer (e.g. by boosting immune responses). Since the gene is expressed in cells of lymphoid origin, the gene or protein, as well as, antibodies directed against the protein may show utility as a tumor marker and/or immunotherapy targets for the above listed tissues. Therefore it may be also used as an agent for immunological disorders including arthritis, asthma, immune deficiency diseases such as AIDS, leukemia, rheumatoid arthritis, inflammatory bowel disease, sepsis, acne, and psoriasis. In addition, this gene product may have commercial utility in the expansion of stem cells and committed progenitors of various blood lineages, and in the differentiation and/or proliferation of various cell types. Protein, as well as, antibodies directed against the protein may show utility as a tumor marker and/or immunotherapy targets for the above listed tissues.

[1424] Many polynucleotide sequences, such as EST sequences, are publicly available and accessible through sequence databases. Some of these sequences are related to SEQ ID NO:199 and may have been publicly available prior to conception of the present invention. Preferably, such related polynucleotides are specifically excluded from the scope of the present invention. To list every related sequence is cumbersome. Accordingly, preferably excluded from the present invention are one or more polynucleotides comprising a nucleotide sequence described by the general formula of a-b, where a is any integer between 1 to 1726 of SEQ ID NO:199, b is an integer of 15 to 1740, where both a and b correspond to the positions of nucleotide residues shown in SEQ ID NO:199, and where b is greater than or equal to a+14.

[1425] Features of Protein Encoded by Gene No: 190

[1426] The translation product of this gene shares sequence homology with human N33, a gene located in a homozygously deleted region of human metastatic prostate cancer, which is thought to be important in prevention of prostate cancer. The gene and its translation product also share sequence homology with an isolated prostate/colon tumor suppressor gene (PSTG) product (WO9532214-A1.). In specific embodiments, polypeptides of the invention comprise, or alternatively consists of, an amino acid sequence selected from the group: AQRKKEMVLSEKVSQLMEWTNKRPVIRMNGDKFRRLVKAPPRNYSVIVMFT ALQLHRQCVVCKQADEEFQILANSWRYSSAFTNRIFFAMVDFDEGSDVFQML NMNSAPTFINFPAKGKPKRGDTYELQVRGFSAEQIARWIADRTDVNIRVIRPP NMAARWRFWCVSVT (SEQ ID NO:1189), MVVALLIVCDVPSAS (SEQ ID NO:1190), AQRKKEMVLSEKVSQL (SEQ ID NO:1191), MEWTNKRPVIRMNGDKF (SEQ ID:1192), RRLVKAPPRNYSVIVMFTALQLHRQCVVCKQADEEFQILANSWRYSSAFTNR IFFA (SEQ ID NO:1193), MVDFDEGSDVFQMLNMNSAPTFINFPAKGKP (SEQ ID NO:1194), KRGDTYELQVRGFSAEQIARWIADRTDVNIRVIRPPN (SEQ ID NO:1195), and/or YAGPLMLGLLLAVIGGLVYLRRVIWNFSLIKLDGLLQLCVLCLL (SEQ ID NO:1196). Moreover, fragments and variants of these polypeptides (such as, for example, fragments as described herein, polypeptides at least 80%, 85%, 90%, 95%, 96%, 97%, 98%, or 99% identical to these polypeptides and polypeptides encoded by the polynucleotide which hybridizes, under stringent conditions, to the polynucleotide encoding these polypeptides) are encompassed by the invention. Antibodies that bind polypeptides of the invention are also encompassed by the invention. Polynucleotides encoding these polypeptides are also encompassed by the invention.

[1427] This gene is expressed primarily in infant adrenal gland, prostate cell line, and to a lesser extent in adrenal gland.

[1428] Polynucleotides and polypeptides of the invention are useful as reagents for differential identification of the tissue(s) or cell type(s) present in a biological sample and for diagnosis of diseases and conditions which include, but are not limited to, prostate cancer and endocrine disorders. Similarly, polypeptides and antibodies directed to these polypeptides are useful in providing immunological probes for differential identification of the tissue(s) or cell type(s). For a number of disorders of the above tissues or cells, particularly of the prostate and adrenal gland, expression of this gene at significantly higher or lower levels may be routinely detected in certain tissues or cell types (e.g. prostate, endocrine, cancerous and wounded tissues) or bodily fluids (e.g., lymph, serum, plasma, urine, synovial fluid and spinal fluid) or another tissue or cell sample taken from an individual having such a disorder, relative to the standard gene expression level, i.e., the expression level in healthy tissue or bodily fluid from an individual not having the disorder.

[1429] Predicted epitopes include those comprising a sequence shown in SEQ ID NO:438 as residues: Pro-34 to Gly-43, Arg-113 to Pro-120.

[1430] The tissue distribution infant adrenal gland, combined with the homology to N33 and prostate/colon tumor suppressor gene (PSTG) indicates that the protein product of this gene is useful for the diagnosis and treatment for prostate cancer and endocrine disorders, and that the nucleic acids and proteins of this gene can be used in the diagnosis and treatment of prostate, endocrine and colorectal cancers. Protein, as well as, antibodies directed against the protein may show utility as a tumor marker and immunotherapy targets for the above listed tumors and tissues.

[1431] Many polynucleotide sequences, such as EST sequences, are publicly available and accessible through sequence databases. Some of these sequences are related to SEQ ID NO:200 and may have been publicly available prior to conception of the present invention. Preferably, such related polynucleotides are specifically excluded from the scope of the present invention. To list every related sequence is cumbersome. Accordingly, preferably excluded from the present invention are one or more polynucleotides comprising a nucleotide sequence described by the general formula of a-b, where a is any integer between 1 to 1693 of SEQ ID NO:200, b is an integer of 15 to 1707, where both a and b correspond to the positions of nucleotide residues shown in SEQ ID NO:200, and where b is greater than or equal to a+14.

[1432] Features of Protein Encoded by Gene No: 191

[1433] This gene is expressed primarily in T-cell, and to a lesser extent in fetal lung.

[1434] Polynucleotides and polypeptides of the invention are useful as reagents for differential identification of the tissue(s) or cell type(s) present in a biological sample and for diagnosis of diseases and conditions which include, but are not limited to, immune and respiratory disorders. Similarly, polypeptides and antibodies directed to these polypeptides are useful in providing immunological probes for differential identification of the tissue(s) or cell type(s). For a number of disorders of the above tissues or cells, particularly of the immune and respiratory systems, expression of this gene at significantly higher or lower levels may be routinely detected in certain tissues or cell types (e.g. immune, respiratory, cancerous and wounded tissues) or bodily fluids (e.g., lymph, serum, plasma, urine, synovial fluid and spinal fluid) or another tissue or cell sample taken from an individual having such a disorder, relative to the standard gene expression level, i.e., the expression level in healthy tissue or bodily fluid from an individual not having the disorder.

[1435] Predicted epitopes include those comprising a sequence shown in SEQ ID NO:439 as residues: Trp-3 to Phe-9.

[1436] The tissue distribution in T-cells and fetal lung indicates that the protein product of this gene is useful for the diagnosis and treatment of immune and respiratory disorders. Furthermore, this gene product may be involved in the regulation of cytokine production, antigen presentation, or other processes that may also suggest a usefulness in the treatment of cancer (e.g. by boosting immune responses). Since the gene is expressed in cells of lymphoid origin, the gene or protein, as well as, antibodies directed against the protein may show utility as a tumor marker and/or immunotherapy targets for the above listed tissues. Therefore it may be also used as an agent for immunological disorders including arthritis, asthma, immune deficiency diseases such as AIDS, leukemia, rheumatoid arthritis, inflammatory bowel disease, sepsis, acne, and psoriasis. In addition, this gene product may have commercial utility in the expansion of stem cells and committed progenitors of various blood lineages, and in the differentiation and/or proliferation of various cell types. Expression of this gene product in T cells also strongly indicates a role for this protein in immune function and immune surveillance. The tissue distribution also indicates that the protein product of this gene is useful for the detection and treatment of disorders associated with developing lungs, particularly in premature infants where the lungs are the last tissues to develop. The tissue distribution indicates that the protein product of this gene is useful for the diagnosis and intervention of lung tumors, since the gene may be involved in the regulation of cell division, particularly since it is expressed in fetal tissue. Protein, as well as, antibodies directed against the protein may show utility as a tumor marker and/or immunotherapy targets for the above listed tissues.

[1437] Many polynucleotide sequences, such as EST sequences, are publicly available and accessible through sequence databases. Some of these sequences are related to SEQ ID NO:201 and may have been publicly available prior to conception of the present invention. Preferably, such related polynucleotides are specifically excluded from the scope of the present invention. To list every related sequence is cumbersome. Accordingly, preferably excluded from the present invention are one or more polynucleotides comprising a nucleotide sequence described by the general formula of a-b, where a is any integer between 1 to 765 of SEQ ID NO:201, b is an integer of 15 to 779, where both a and b correspond to the positions of nucleotide residues shown in SEQ ID NO:201, and where b is greater than or equal to a+14.

[1438] Features of Protein Encoded by Gene No: 192

[1439] The gene encoding the disclosed cDNA is thought to reside on chromosome 6. Accordingly, polynucleotides related to this invention are useful as a marker in linkage analysis for chromosome 6. The translation product of this gene shares significant homology with the rat protein Neuritin, and in fact appears to be a human ortholog of the rat protein. It is believed that this gene is induced in rats by neural activity and neurotrophins, and that it promotes neuritogenesis. Neural activity and neurotrophins induce synaptic remodeling in part by altering gene expression. This gene is believed to be a glycosylphoshatidylinositol-anchored protein encoded by a hippocampal gene, and to possess neural activity. This molecule is believed to be expressed in post-mitotic differentiating neurons of the developing nervous system and neuronal structures associated with plasticity in the adult. Message of this gene is believed to be induced by neuronal activity and by the activity-regulated neurotrophins BDNF and NT-3. The product of this gene i]s believed to stimulate neurite outgrowth and arborization in primary embryonic hippocampal and cortical cultures, and to act as a downstream effector of activity-induced neurite outgrowth. In specific embodiments, polypeptides of the invention comprise, or alternatively consists of, an amino acid sequence selected from the group: DAVFKGFSDCLLKLGDS (SEQ ID NO:1197), CQEGAKDMWDKLRKESKNLN (SEQ ID NO:1198), VLLVSLSAALATWLSF (SEQ ID NO:1199), MGLKLNGRYISLILAVQIAYLVQAVRAAGKCDAVFKGFSDCLLKLGDS (SEQ ID NO:1200), PAAWDDKTNIKTVCTYWEDFHSCTVTALTDCQEGAKDMWDKLRKESKNLN IQGSLFELCGSGNGAAGSLLPAFPVLLVSLSAALATWLSF (SEQ ID NO:1201), and/or MGLKLNGRYISLILAVQIAYLVQAVRAAGKCDAVFKGFSDCLLKLGDSXXX XXPAAWDDKTNIKTVCTYWEDFHSCTVTALTDCQEGAKDMWDKLRKESKN LNIQGSLFELCGSGNGAAGSLLPAFPVLLVSLSAALATWLSF (SEQ ID NO:1202). Moreover, fragments and variants of these polypeptides (such as, for example, fragments as described herein, polypeptides at least 80%, 85%, 90%, 95%, 96%, 97%, 98%, or 99% identical to these polypeptides and polypeptides encoded by the polynucleotide which hybridizes, under stringent conditions, to the polynucleotide encoding these polypeptides) are encompassed by the invention. Antibodies that bind polypeptides of the invention are also encompassed by the invention. Polynucleotides encoding these polypeptides are also encompassed by the invention.

[1440] This gene is expressed primarily in human placenta, endometrial tumor and tissues of the central nervous system (CNS).

[1441] Polynucleotides and polypeptides of the invention are useful as reagents for differential identification of the tissue(s) or cell type(s) present in a biological sample and for diagnosis of diseases and conditions which include, but are not limited to, relating to reproductive disorders, cancers and neurological diseases. Similarly, polypeptides and antibodies directed to these polypeptides are useful in providing immunological probes for differential identification of the tissue(s) or cell type(s). For a number of disorders of the above tissues or cells, particularly of the reproductive and neurological disorders, expression of this gene at significantly higher or lower levels may be routinely detected in certain tissues or cell types (e.g. reproductive, neurological, cancerous and wounded tissues) or bodily fluids (e.g., lymph, serum, plasma, urine, synovial fluid and spinal fluid) or another tissue or cell sample taken from an individual having such a disorder, relative to the standard gene expression level, i.e., the expression level in healthy tissue or bodily fluid from an individual not having the disorder.

[1442] Predicted epitopes include those comprising a sequence shown in SEQ D NO:440 as residues: Asp-47 to Asp-63, His-75 to Tyr-80, Pro-83 to Tyr-89.

[1443] The tissue distribution indicates that the protein product of this gene is useful for the diagnosis and treatment of reproductive disorders such as endometrial tumors. Expression of this gene in tissues of the CNS, and its strong homology to Neuritin, suggest that the protein product from this gene is also useful in the treatment and diagnosis of neurological disorders and in the regeneration of neural tissues, e.g., following injury.

[1444] Many polynucleotide sequences, such as EST sequences, are publicly available and accessible through sequence databases. Some of these sequences are related to SEQ ID NO:202 and may have been publicly available prior to conception of the present invention. Preferably, such related polynucleotides are specifically excluded from the scope of the present invention. To list every related sequence is cumbersome. Accordingly, preferably excluded from the present invention are one or more polynucleotides comprising a nucleotide sequence described by the general formula of a-b, where a is any integer between 1 to 1603 of SEQ ID NO:202, b is an integer of 15 to 1617, where both a and b correspond to the positions of nucleotide residues shown in SEQ ID NO:202, and where b is greater than or equal to a+14.

[1445] Features of Protein Encoded by Gene No: 193

[1446] The translation product of this gene shares sequence homology with tenascin, which is thought to be important in development. The translation product of this gene is believed to be a ligand of the fibroblast growth factor family. FGF ligand activity is known in the art and can be assayed by methods known in the art and disclosed elsewhere herein.

[1447] Northern analysis indicates that a 2.5 kb band is expressed in brain and lung. It has also been discovered that this gene is expressed in endometrial tumor, synovial sarcoma, pancreas tumor, fetal lung, retinal, and immune tissues (e.g., bone marrow)

[1448] Polynucleotides and polypeptides of the invention are useful as reagents for differential identification of the tissue(s) or cell type(s) present in a biological sample and for diagnosis of diseases and conditions which include, but are not limited to, cancers, growth disorders of the brain and lung. Similarly, polypeptides and antibodies directed to these polypeptides are useful in providing immunological probes for differential identification of the tissue(s) or cell type(s). For a number of disorders of the above tissues or cells, particularly of the cancer tissues, brain, lung, expression of this gene at significantly higher or lower levels may be routinely detected in certain tissues or cell types (e.g. brain, lung, cancerous and wounded tissues) or bodily fluids (e.g., lymph, serum, plasma, urine, synovial fluid and spinal fluid) or another tissue or cell sample taken from an individual having such a disorder, relative to the standard gene expression level, i.e., the expression level in healthy tissue or bodily fluid from an individual not having the disorder.

[1449] Predicted epitopes include those comprising a sequence shown in SEQ ID NO:441 as residues: Gly-29 to Glu-34, Arg-71 to Arg-76, Thr-176 to Cys-182, Gly-184 to Glu-199. As a preferred embodiment, antibodies that bind said epitopes are encompassed by the invention and may be useful as a cancer diagnostic and/or an agonist/antagonist of the polypeptides of the invention.

[1450] Fragments and variants of the polypeptide encoded by this gene (such as, for example, fragments as described herein, polypeptides at least 80%, 85%, 90%, 95%, 96%, 97%, 98%, or 99% identical to these polypeptides and polypeptides encoded by the polynucleotide which hybridizes, under stringent conditions, to the polynucleotide encoding these polypeptides, or the complement there of are encompassed by the invention). Antibodies that bind polypeptides of the invention are also encompassed by the invention. Polynucleotides encoding these polypeptides are also encompassed by the invention. Antibodies that bind polypeptides of the invention would be useful as a cancer diagnostic.

[1451] Preferred polypeptide fragments of the invention comprise, or alternatively consist of, the secreted protein having a continuous series of deleted residues from the amino or the carboxy terminus, or both. Particularly, N-terminal deletions of the polypeptide can be described by the general formula m-379 where m is an integer from 2 to 371, where m corresponds to the position of the amino acid residue identified in SEQ ID NO:441. More in particular, the invention provides polynucleotides encoding polypeptides comprising, or alternatively consisting of, an amino acid sequence selected from the group: A-2 to W-379; R-3 to W-379; R-4 to W-379; S-5 to W-379; A-6 to W-379; F-7 to W-379; P-8 to W-379; A-9 to W-379; A-10 to W-379; A-11 to W-379; L-12 to W-379; W-13 to W-379; L-14 to W-379; W-15 to W-379; S-16 to W-379; I-17 to W-379; L-18 to W-379; L-19 to W-379; C-20 to W-379; L-21 to W-379; L-22 to W-379; A-23 to W-379; L-24 to W-379; R-25 to W-379; A-26 to W-379; E-27 to W-379; A-28 to W-379; G-29 to W-379; P-30 to W-379; P-31 to W-379; Q-32 to W-379; E-33 to W-379; E-34 to W-379; S-35 to W-379; L-36 to W-379; Y-37 to W-379; L-38 to W-379; W-39 to W-379; I-40 to W-379; D-41 to W-379; A-42 to W-379; H-43 to W-379; Q-44 to W-379; A-45 to W-379; R-46 to W-379; V-47 to W-379; L-48 to W-379; I-49 to W-379; G-50 to W-379; F-51 to W-379; E-52 to W-379; E-53 to W-379; D-54 to W-379; I-55 to W-379; L-56 to W-379; I-57 to W-379; V-58 to W-379; S-59 to W-379; E-60 to W-379; G-61 to W-379; K-62 to W-379; M-63 to W-379; A-64 to W-379; P-65 to W-379; F-66 to W-379; T-67 to W-379; H-68 to W-379; D-69 to W-379; F-70 to W-379; R-71 to W-379; K-72 to W-379; A-73 to W-379; Q-74 to W-379; Q-75 to W-379; R-76 to W-379; M-77 to W-379; P-78 to W-379; A-79 to W-379; I-80 to W-379; P-81 to W-379; V-82 to W-379; N-83 to W-379; I-84 to W-379; H-85 to W-379; S-86 to W-379; M-87 to W-379; N-88 to W-379; F-89 to W-379; T-90 to W-379; W-91 to W-379; Q-92 to W-379; A-93 to W-379; A-94 to W-379; G-95 to W-379; Q-96 to W-379; A-97 to W-379; E-98 to W-379; Y-99 to W-379; F-100 to W-379; Y-101 to W-379; E-102 to W-379; F-103 to W-379; L-104 to W-379; S-105 to W-379; L-106 to W-379; R-107 to W-379; S-108 to W-379; L-109 to W-379; D-110 to W-379; K-111 to W-379; G-112 to W-379; I-113 to W-379; M-114 to W-379; A-115 to W-379; D-116 to W-379; P-117 to W-379; T-118 to W-379; V-119 to W-379; N-120 to W-379; V-121 to W-379; P-122 to W-379; L-123 to W-379; L-124 to W-379; G-125 to W-379; T-126 to W-379; V-127 to W-379; P-128 to W-379; H-129 to W-379; K-130 to W-379; A-131 to W-379; S-132 to W-379; V-133 to W-379; V-134 to W-379; Q-135 to W-379; V-136 to W-379; G-137 to W-379; F-138 to W-379; P-139 to W-379; C-140 to W-379; L-141 to W-379; G-142 to W-379; K-143 to W-379; Q-144 to W-379; D-145 to W-379; G-146 to W-379; V-147 to W-379; A-148 to W-379; A-149 to W-379; F-150 to W-379; E-151 to W-379; V-152 to W-379; D-153 to W-379; V-154 to W-379; I-155 to W-379; V-156 to W-379; M-157 to W-379; N-158 to W-379; S-159 to W-379; E-160 to W-379; G-161 to W-379; N-162 to W-379; T-163 to W-379; I-164 to W-379; L-165 to W-379; Q-166 to W-379; T-167 to W-379; P-168 to W-379; Q-169 to W-379; N-170 to W-379; A-171 to W-379; I-172 to W-379; F-173 to W-379; F-174 to W-379; K-175 to W-379; T-176 to W-379; C-177 to W-379; Q-178 to W-379; Q-179 to W-379; A-180 to W-379; E-181 to W-379; C-182 to W-379; P-183 to W-379; G-184 to W-379; G-185 to W-379; C-186 to W-379; R-187 to W-379; N-188 to W-379; G-189 to W-379; G-190 to W-379; F-191 to W-379; C-192 to W-379; N-193 to W-379; E-194 to W-379; R-195 to W-379; R-196 to W-379; I-197 to W-379; C-198 to W-379; E-199 to W-379; C-200 to W-379; P-201 to W-379; D-202 to W-379; G-203 to W-379; F-204 to W-379; H-205 to W-379; G-206 to W-379; P-207 to W-379; H-208 to W-379; C-209 to W-379; E-210 to W-379; K-211 to W-379; A-212 to W-379; L-213 to W-379; C-214 to W-379; T-215 to W-379; P-216 to W-379; R-217 to W-379; C-218 to W-379; M-219 to W-379; N-220 to W-379; G-221 to W-379; G-222 to W-379; L-223 to W-379; C-224 to W-379; V-225 to W-379; T-226 to W-379; P-227 to W-379; G-228 to W-379; F-229 to W-379; C-230 to W-379; I-231 to W-379; C-232 to W-379; P-233 to W-379; P-234 to W-379; G-235 to W-379; F-236 to W-379; Y-237 to W-379; G-238 to W-379; V-239 to W-379; N-240 to W-379; C-241 to W-379; D-242 to W-379; K-243 to W-379; A-244 to W-379; N-245 to W-379; C-246 to W-379; S-247 to W-379; T-248 to W-379; T-249 to W-379; C-250 to W-379; F-251 to W-379; N-252 to W-379; G-253 to W-379; G-254 to W-379; T-255 to W-379; C-256 to W-379; F-257 to W-379; Y-258 to W-379; P-259 to W-379; G-260 to W-379; K-261 to W-379; C-262 to W-379; I-263 to W-379; C-264 to W-379; P-265 to W-379; P-266 to W-379; G-267 to W-379; L-268 to W-379; E-269 to W-379; G-270 to W-379; E-271 to W-379; Q-272 to W-379; C-273 to W-379; E-274 to W-379; I-275 to W-379; S-276 to W-379; K-277 to W-379; C-278 to W-379; P-279 to W-379; Q-280 to W-379; P-281 to W-379; C-282 to W-379; R-283 to W-379; N-284 to W-379; G-285 to W-379; G-286 to W-379; K-287 to W-379; C-288 to W-379; I-289 to W-379; G-290 to W-379; K-291 to W-379; S-292 to W-379; K-293 to W-379; C-294 to W-379; K-295 to W-379; C-296 to W-379; S-297 to W-379; K-298 to W-379; G-299 to W-379; Y-300 to W-379; Q-301 to W-379; G-302 to W-379; D-303 to W-379; L-304 to W-379; C-305 to W-379; S-306 to W-379; K-307 to W-379; P-308 to W-379; V-309 to W-379; C-310 to W-379; E-311 to W-379; P-312 to W-379; G-313 to W-379; C-314 to W-379; G-315 to W-379; A-316 to W-379; H-317 to W-379; G-318 to W-379; T-319 to W-379; C-320 to W-379; H-321 to W-379; E-322 to W-379; P-323 to W-379; N-324 to W-379; K-325 to W-379; C-326 to W-379; Q-327 to W-379; C-328 to W-379; Q-329 to W-379; E-330 to W-379; G-331 to W-379; W-332 to W-379; H-333 to W-379; G-334 to W-379; R-335 to W-379; H-336 to W-379; C-337 to W-379; N-338 to W-379; K-339 to W-379; R-340 to W-379; Y-341 to W-379; E-342 to W-379; A-343 to W-379; S-344 to W-379; L-345 to W-379; I-346 to W-379; H-347 to W-379; A-348 to W-379; L-349 to W-379; R-350 to W-379; P-351 to W-379; A-352 to W-379; G-353 to W-379; A-354 to W-379; Q-355 to W-379; L-356 to W-379; R-357 to W-379; Q-358 to W-379; H-359 to W-379; T-360 to W-379; P-361 to W-379; S-362 to W-379; L-363 to W-379; K-364 to W-379; K-365 to W-379; A-366 to W-379; E-367 to W-379; E-368 to W-379; R-369 to W-379; R-370 to W-379; D-371 to W-379; P-372 to W-379; P-373 to W-379; and E-374 to W-379 of SEQ ID NO:441. Polypeptides encoded by these polynucleotides are also encompassed by the invention. Moreover, fragments and variants of these polypeptides (such as, for example, fragments as described herein, polypeptides at least 80%, 85%, 90%, 95%, 96%, 97%, 98%, or 99% identical to these polypeptides and polypeptides encoded by the polynucleotide which hybridizes, under stringent conditions, to the polynucleotide encoding these polypeptides, or the complement there of are encompassed by the invention. Antibodies that bind polypeptides of the invention are also encompassed by the invention. Polynucleotides encoding these polypeptides are also encompassed by the invention.

[1452] Also as mentioned above, even if deletion of one or more amino acids from the C-terminus of a protein results in modification of loss of one or more biological functions of the protein, other functional activities (e.g., biological activities, ability to multimerize, ability to bind ligand, ability to generate antibodies, ability to bind antibodies) may still be retained. For example the ability of the shortened polypeptide to induce and/or bind to antibodies which recognize the complete or mature forms of the polypeptide generally will be retained when less than the majority of the residues of the complete or mature polypeptide are removed from the C-terminus. Whether a particular polypeptide lacking C-terminal residues of a complete polypeptide retains such immunologic activities can readily be determined by routine methods described herein and otherwise known in the art. It is not unlikely that a polypeptide with a large number of deleted C-terminal amino acid residues may retain some biological or immunogenic activities. In fact, peptides composed of as few as six amino acid residues may often evoke an immune response.

[1453] Accordingly, the present invention further provides polypeptides having one or more residues deleted from the carboxy terminus of the amino acid sequence of the polypeptide shown in SEQ ID NO:441, as described by the general formula 1-n, where n is an integer from 6 to 378, where n corresponds to the position of the amino acid residue identified in SEQ ID NO:441. More in particular, the invention provides polynucleotides encoding polypeptides comprising, or alternatively consisting of, an amino acid sequence selected from the group: M-1 to I-378; M-1 to Y-377; M-1 to N-376; M-1 to S-375; M-1 to E-374; M-1 to P-373; M-1 to P-372; M-1 to D-371; M-1 to R-370; M-1 to R-369; M-1 to E-368; M-1 to E-367; M-1 to A-366; M-1 to K-365; M-1 to K-364; M-1 to L-363; M-1 to S-362; M-1 to P-361; M-1 to T-360; M-1 to H-359; M-1 to Q-358; M-1 to R-357; M-1 to L-356; M-1 to Q-355; M-1 to A-354; M-1 to G-353; M-1 to A-352; M-1 to P-351; M-1 to R-350; M-1 to L-349; M-1 to A-348; M-1 to H-347; M-1 to I-346; M-1 to L-345; M-1 to S-344; M-1 to A-343; M-1 to E-342; M-1 to Y-341; M-1 to R-340; M-1 to K-339; M-1 to N-338; M-1 to C-337; M-1 to H-336; M-1 to R-335; M-1 to G-334; M-1 to H-333; M-1 to W-332; M-1 to G-331; M-1 to E-330; M-1 to Q-329; M-1 to C-328; M-1 to Q-327; M-1 to C-326; M-1 to K-325; M-1 to N-324; M-1 to P-323; M-1 to E-322; M-1 to H-321; M-1 to C-320; M-1 to T-319; M-1 to G-318; M-1 to H-317; M-1 to A-316; M-1 to G-315; M-1 to C-314; M-1 to G-313; M-1 to P-312; M-1 to E-311; M-1 to C-310; M-1 to V-309; M-1 to P-308; M-1 to K-307; M-1 to S-306; M-1 to C-305; M-1 to L-304; M-1 to D-303; M-1 to G-302; M-1 to Q-301; M-1 to Y-300; M-1 to G-299; M-1 to K-298; M-1 to S-297; M-1 to C-296; M-1 to K-295; M-1 to C-294; M-1 to K-293; M-1 to S-292; M-1 to K-291; M-1 to G-290; M-1 to I-289; M-1 to C-288; M-1 to K-287; M-1 to G-286; M-1 to G-285; M-1 to N-284; M-1 to R-283; M-1 to C-282; M-1 to P-281; M-1 to Q-280; M-1 to P-279; M-1 to C-278; M-1 to K-277; M-1 to S-276; M-1 to I-275; M-1 to E-274; M-1 to C-273; M-1 to Q-272; M-1 to E-271; M-1 to G-270; M-1 to E-269; M-1 to L-268; M-1 to G-267; M-1 to P-266; M-1 to P-265; M-1 to C-264; M-1 to I-263; M-1 to C-262; M-1 to K-261; M-1 to G-260; M-1 to P-259; M-1 to Y-258; M-1 to F-257; M-1 to C-256; M-1 to T-255; M-1 to G-254; M-1 to G-253; M-1 to N-252; M-1 to F-251; M-1 to C-250; M-1 to T-249; M-1 to T-248; M-1 to S-247; M-1 to C-246; M-1 to N-245; M-1 to A-244; M-1 to K-243; M-1 to D-242; M-1 to C-241; M-1 to N-240; M-1 to V-239; M-1 to G-238; M-1 to Y-237; M-1 to F-236; M-1 to G-235; M-1 to P-234; M-1 to P-233; M-1 to C-232; M-1 to I-231; M-1 to C-2310; M-1 to F-229; M-1 to G-228; M-1 to P-227; M-1 to T-226; M-1 to V-225; M-1 to C-224; M-1 to L-223; M-1 to G-222; M-1 to G-221; M-1 to N-220; M-1 to M-219; M-1 to C-218; M-1 to R-217; M-1 to P-216; M-1 to T-215; M-1 to C-214; M-1 to L-213; M-1 to A-212; M-1 to K-211; M-1 to E-210; M-1 to C-209; M-1 to H-208; M-1 to P-207; M-1 to G-206; M-1 to H-205; M-1 to F-204; M-1 to G-203; M-1 to D-202; M-1 to P-201; M-1 to C-200; M-1 to E-199; M-1 to C-198; M-1 to I-197; M-1 to R-196; M-1 to R-195; M-1 to E-194; M-1 to N-193; M-1 to C-192; M-1 to F-191; M-1 to G-190; M-1 to G-189; M-1 to N-188; M-1 to R-187; M-1 to C-186; M-1 to G-185; M-1 to G-184; M-1 to P-183; M-1 to C-182; M-1 to E-181; M-1 to A-180; M-1 to Q-179; M-1 to Q-178; M-1 to C-177; M-1 to T-176; M-1 to K-175; M-1 to F-174; M-1 to F-173; M-1 to I-172; M-1 to A-171; M-1 to N-170; M-1 to Q-169; M-1 to P-168; M-1 to T-167; M-1 to Q-166; M-1 to L-165; M-1 to I-164; M-1 to T-163; M-1 to N-162; M-1 to G-161; M-1 to E-160; M-1 to S-159; M-1 to N-158; M-1 to M-157; M-1 to V-156; M-1 to I-155; M-1 to V-154; M-1 to D-153; M-1 to V-152; M-1 to E-151; M-1 to F-150; M-1 to A-149; M-1 to A-148; M-1 to V-147; M-1 to G-146; M-1 to D-145; M-1 to Q-144; M-1 to K-143; M-1 to G-142; M-1 to L-141; M-1 to C-140; M-1 to P-139; M-1 to F-138; M-1 to G-137; M-1 to V-136; M-1 to Q-135; M-1 to V-134; M-1 to V-133; M-1 to S-132; M-1 to A-131; M-1 to K-130; M-1 to H-129; M-1 to P-128; M-1 to V-127; M-1 to T-126; M-1 to G-125; M-1 to L-124; M-1 to L-123; M-1 to P-122; M-1 to V-121; M-1 to N-120; M-1 to V-119; M-1 to T-118; M-1 to P-117; M-1 to D-116; M-1 to A-115; M-1 to M-114; M-1 to I-113; M-1 to G-112; M-1 to K-111; M-1 to D-110; M-1 to L-109; M-1 to S-108; M-1 to R-107; M-1 to L-106; M-1 to S-105; M-1 to L-104; M-1 to F-103; M-1 to E-102; M-1 to Y-101; M-1 to F-100; M-1 to Y-99; M-1 to E-98; M-1 to A-97; M-1 to Q-96; M-1 to G-95; M-1 to A-94; M-1 to A-93; M-1 to Q-92; M-1 to W-91; M-1 to T-90; M-1 to F-89; M-1 to N-88; M-1 to M-87; M-1 to S-86; M-1 to H-85; M-1 to I-84; M-1 to N-83; M-1 to V-82; M-1 to P-81; M-1 to I-80; M-1 to A-79; M-1 to P-78; M-1 to M-77; M-1 to R-76; M-1 to Q-75; M-1 to Q-74; M—l to A-73; M-1 to K-72; M-1 to R-71; M-1 to F-70; M-1 to D-69; M-1 to H-68; M-1 to T-67; M-1 to F-66; M-1 to P-65; M-1 to A-64; M-1 to M-63; M-1 to K-62; M-1 to G-61; M-1 to E-60; M-1 to S-59; M-1 to V-58; M-1 to I-57; M-1 to L-56; M-1 to I-55; M-1 to D-54; M-1 to E-53; M-1 to E-52; M-1 to F-51; M-1 to G-50; M-1 to I-49; M-1 to L-48; M-1 to V-47; M-1 to R-46; M-1 to A-45; M-1 to Q-44; M-1 to H-43; M-1 to A-42; M-1 to D-41; M-1 to I-40; M-1 to W-39; M-1 to L-38; M-1 to Y-37; M-1 to L-36; M-1 to S-35; M-1 to E-34; M-1 to E-33; M-1 to Q-32; M-1 to P-31; M-1 to P-30; M-1 to G-29; M-1 to A-28; M-1 to E-27; M-1 to A-26; M-1 to R-25; M-1 to L-24; M-1 to A-23; M-1 to L-22; M-1 to L-21; M-1 to C-20; M-1 to L-19; M-1 to L-18; M-1 to I-17; M-1 to S-16; M-1 to W-15; M-1 to L-14; M-1 to W-13; M-1 to L-12; M-1 to A-11; M-1 to A-10; M-1 to A-9; M-1 to P-8; M-1 to F-7; and M-1 to A-6 of SEQ ID NO:441. Polypeptides encoded by these polynucleotides are also encompassed by the invention. Moreover, fragments and variants of these polypeptides (such as, for example, fragments as described herein, polypeptides at least 80%, 85%, 90%, 95%, 96%, 97%, 98%, or 99% identical to these polypeptides and polypeptides encoded by the polynucleotide which hybridizes, under stringent conditions, to the polynucleotide encoding these polypeptides, or the complement there of are encompassed by the invention. Antibodies that bind polypeptides of the invention are also encompassed by the invention. Polynucleotides encoding these polypeptides are also encompassed by the invention.

[1454] The tissue distribution in brain and lung, combined with the homology to tenascin indicates that the protein product of this gene is useful for diagnosis and treatment of cancers. Alternatively, given the tissue distribution indicated by Northern analysis, the translation product of this gene is thought to be a growth factor functioning in the brain and lung that may be useful in treating neurodegeneration and lung disorder. For example, the protein product of this gene is useful for the detection and treatment of disorders associated with developing lungs, particularly in premature infants where the lungs are the last tissues to develop. Furthermore, the tissue distribution indicates that the protein product of this gene is useful for the diagnosis and intervention of lung tumors, since the gene may be involved in the regulation of cell division. Additionally, expression in the brain indicates that it may be involved in neuronal survival; synapse formation; conductance; neural differentiation, etc. Such involvement may impact many processes, such as learning and cognition. It may also be useful in the treatment of such neurodegenerative disorders as schizophrenia; ALS; or Alzheimer's.

[1455] Polynucleotides and polypeptides corresponding to this gene are useful for the treatment and diagnosis of hematopoietic related disorders such as anemia, pancytopenia, leukopenia, thrombocytopenia or leukemia since stromal cells are important in the production of cells of hematopoietic lineages. Representative uses are described in the “Immune Activity” and “Infectious Disease” sections below, in Example 11, 13, 14, 16, 18, 19, 20, and 27, and elsewhere herein. Briefly, the uses include bone marrow cell ex-vivo culture, bone marrow transplantation, bone marrow reconstitution, radiotherapy or chemotherapy of neoplasia. The gene product may also be involved in lymphopoiesis, therefore, it can be used in immune disorders such as infection, inflammation, allergy, immunodeficiency etc. In addition, this gene product may have commercial utility in the expansion of stem cells and committed progenitors of various blood lineages, and in the differentiation and/or proliferation of various cell types.

[1456] Protein, as well as, antibodies directed against the protein may show utility as a tissue-specific marker and/or immunotherapy target for the above listed tissues.

[1457] Many polynucleotide sequences, such as EST sequences, are publicly available and accessible through sequence databases. Some of these sequences are related to SEQ ID NO:203 and may have been publicly available prior to conception of the present invention. Preferably, such related polynucleotides are specifically excluded from the scope of the present invention. To list every related sequence is cumbersome. Accordingly, preferably excluded from the present invention are one or more polynucleotides comprising a nucleotide sequence described by the general formula of a-b, where a is any integer between 1 to 1960 of SEQ ID NO:203, b is an integer of 15 to 1974, where both a and b correspond to the positions of nucleotide residues shown in SEQ ID NO:203, and where b is greater than or equal to a+14.

[1458] Features of Protein Encoded by Gene No: 194

[1459] In specific embodiments, polypeptides of the invention comprise, or alternatively consists of, an amino acid sequence selected from the group: MNSAAGFSHLDRRERVLKLGESPEKQPRCASTLC (SEQ ID NO:1203). Moreover, fragments and variants of these polypeptides (such as, for example, fragments as described herein, polypeptides at least 80%, 85%, 90%, 95%, 96%, 97%, 98%, or 99% identical to these polypeptides and polypeptides encoded by the polynucleotide which hybridizes, under stringent conditions, to the polynucleotide encoding these polypeptides) are encompassed by the invention. Antibodies that bind polypeptides of the invention are also encompassed by the invention. Polynucleotides encoding these polypeptides are also encompassed by the invention.

[1460] This gene is expressed primarily in fetal human lung and neutrophils.

[1461] Polynucleotides and polypeptides of the invention are useful as reagents for differential identification of the tissue(s) or cell type(s) present in a biological sample and for diagnosis of diseases and conditions which include, but are not limited to, lung development and respiratory disorders. Similarly, polypeptides and antibodies directed to these polypeptides are useful in providing immunological probes for differential identification of the tissue(s) or cell type(s). For a number of disorders of the above tissues or cells, particularly of the respiratory system, expression of this gene at significantly higher or lower levels may be routinely detected in certain tissues or cell types (e.g. respiratory, immune, cancerous and wounded tissues) or bodily fluids (e.g., lymph, serum, plasma, urine, synovial fluid and spinal fluid) or another tissue or cell sample taken from an individual having such a disorder, relative to the standard gene expression level, i.e., the expression level in healthy tissue or bodily fluid from an individual not having the disorder.

[1462] The tissue distribution in fetal lung and neutrophils indicates that the protein product of this gene is useful for the diagnosis and treatment of lung and immunity related diseases, for example, lung cancer, viral, fungal or bacterial infections (e.g. lesions caused by tuberculosis), inflammation (e.g. pneumonia), metabolic lesions etc. Furthermore, the tissue distribution indicates that the protein product of this gene is useful for the detection and treatment of disorders associated with developing lungs, particularly in premature infants where the lungs are the last tissues to develop. The tissue distribution indicates that the protein product of this gene is useful for the diagnosis and intervention of lung tumors, since the gene may be involved in the regulation of cell division, particularly since it is expressed in fetal tissue. Protein, as well as, antibodies directed against the protein may show utility as a tumor marker and immunotherapy targets for the above listed tumors and tissues.

[1463] Many polynucleotide sequences, such as EST sequences, are publicly available and accessible through sequence databases. Some of these sequences are related to SEQ ID NO:204 and may have been publicly available prior to conception of the present invention. Preferably, such related polynucleotides are specifically excluded from the scope of the present invention. To list every related sequence is cumbersome. Accordingly, preferably excluded from the present invention are one or more polynucleotides comprising a nucleotide sequence described by the general formula of a-b, where a is any integer between 1 to 1043 of SEQ ID NO:204, b is an integer of 15 to 1057, where both a and b correspond to the positions of nucleotide residues shown in SEQ ID NO:204, and where b is greater than or equal to a+14.

[1464] Features of Protein Encoded by Gene No: 195

[1465] This gene is expressed primarily in breast lymph node, and to a lesser extent in synovial tissues.

[1466] Polynucleotides and polypeptides of the invention are useful as reagents for differential identification of the tissue(s) or cell type(s) present in a biological sample and for diagnosis of diseases and conditions which include, but are not limited to, immune and skeletal disorders. Similarly, polypeptides and antibodies directed to these polypeptides are useful in providing immunological probes for differential identification of the tissue(s) or cell type(s). For a number of disorders of the above tissues or cells, particularly of the immune system and skeletal system, expression of this gene at significantly higher or lower levels may be routinely detected in certain tissues or cell types (e.g. immune, skeletal, cancerous and wounded tissues) or bodily fluids (e.g., lymph, serum, plasma, urine, synovial fluid and spinal fluid) or another tissue or cell sample taken from an individual having such a disorder, relative to the standard gene expression level, i.e., the expression level in healthy tissue or bodily fluid from an individual not having the disorder.

[1467] The tissue distribution in breast lymph node and synovium indicates that the protein product of this gene is useful for the diagnosis and treatment of immune and skeletal disorders. Furthermore, this gene product may be involved in the regulation of cytokine production, antigen presentation, or other processes that may also suggest a usefulness in the treatment of cancer (e.g. by boosting immune responses). Since the gene is expressed in cells of lymphoid origin, the gene or protein, as well as, antibodies directed against the protein may show utility as a tumor marker and/or immunotherapy targets for the above listed tissues. Therefore it may be also used as an agent for immunological disorders including arthritis, asthma, immune deficiency diseases such as AIDS, leukemia, rheumatoid arthritis, inflammatory bowel disease, sepsis, acne, and psoriasis. In addition, this gene product may have commercial utility in the expansion of stem cells and committed progenitors of various blood lineages, and in the differentiation and/or proliferation of various cell types. Protein, as well as, antibodies directed against the protein may show utility as a tumor marker and/or immunotherapy targets for the above listed tissues. The expression of this gene product in synovium indicates a role in the detection and treatment of disorders and conditions affecting the skeletal system, in particular osteoporosis as well as disorders afflicting connective tissues (e.g. arthritis, trauma, tendonitis, chrondomalacia and inflammation), such as in the diagnosis or treatment of various autoimmune disorders such as rheumatoid arthritis, lupus, scleroderma, and dermatomyositis as well as dwarfism, spinal deformation, and specific joint abnormalities as well as chondrodysplasias (i.e. spondyloepiphyseal dysplasia congenita, familial osteoarthritis, Atelosteogenesis type II, metaphyseal chondrodysplasia type Schmid). Protein, as well as, antibodies directed against the protein may show utility as a tumor marker and/or immunotherapy targets for the above listed tissues.

[1468] Many polynucleotide sequences, such as EST sequences, are publicly available and accessible through sequence databases. Some of these sequences are related to SEQ ID NO:205 and may have been publicly available prior to conception of the present invention. Preferably, such related polynucleotides are specifically excluded from the scope of the present invention. To list every related sequence is cumbersome. Accordingly, preferably excluded from the present invention are one or more polynucleotides comprising a nucleotide sequence described by the general formula of a-b, where a is any integer between 1 to 707 of SEQ ID NO:205, b is an integer of 15 to 721, where both a and b correspond to the positions of nucleotide residues shown in SEQ ID NO:205, and where b is greater than or equal to a+14.

[1469] Features of Protein Encoded by Gene No: 196

[1470] The gene encoding the disclosed cDNA is thought to reside on chromosome 5. Accordingly, polynucleotides related to this invention are useful as a marker in linkage analysis for chromosome 5. The translation product of this gene shares sequence homology with human M-phase phosphoprotein 4, which is thought to be important in the phosphorylation and signal transduction processes. In specific embodiments, polypeptides of the invention comprise, or alternatively consists of, an amino acid sequence selected from the group: TIYPTEEELQAVQKIVSITERALKLVSD (SEQ ID NO:1204), RALKGVLRVGVLAKGLLLRGDRNVNLVLLC (SEQ ID NO:1205), ALAALRHAKWFQARANGLQSCVIIRILRDLCQRVPTWS (SEQ ID NO:1206), GDALRRVFECISSGIIL (SEQ ID NO:1207), LAFRQIHKVLGMDPLP (SEQ ID NO:1208), and/or TIYPTEEELQAVQKIVSITERALKLVSDSLSEHEKNKNKEGDDKKEGGKDRAL KGVLRVGVLAKGLLLRGDRNVNLVLLCSEKPSKTLLSRIAENLPKQLAVISPE KYDIKCAVSEAAIILNSCVEPKMQVTITLTSPIIREENMREGDVTSGMVKDPPD VLDRQKCLDALAALRHAKWFQARANGLQSCVIIIRILRDLCQRVPTWSDFPS WAMELLVEKAISSASSPQSPGDALRRVFECISSGIILKGSPGLLDPCEKDPFDTL ATMTDQQREDITSSAQFALRLLAFRQIHKVLGMDPLPQMSQRFNIHNNRKRR RDSDGVDGFEAEGKKDKKDYDNF (SEQ ID NO:1209), MERHPKKKMCSD (SEQ ID NO:1210), and/or GENSSSDFFPLFLFYFLVALASPPIFVSFIN (SEQ ID NO:1211). Moreover, fragments and variants of these polypeptides (such as, for example, fragments as described herein, polypeptides at least 80%, 85%, 90%, 95%, 96%, 97%, 98%, or 99% identical to these polypeptides and polypeptides encoded by the polynucleotide which hybridizes, under stringent conditions, to the polynucleotide encoding these polypeptides) are encompassed by the invention. Antibodies that bind polypeptides of the invention are also encompassed by the invention. Polynucleotides encoding these polypeptides are also encompassed by the invention.

[1471] This gene is expressed primarily in human hippocampus, and to a lesser extent in prostate and human frontal cortex.

[1472] Polynucleotides and polypeptides of the invention are useful as reagents for differential identification of the tissue(s) or cell type(s) present in a biological sample and for diagnosis of diseases and conditions which include, but are not limited to, disorders related to the reproductive and nervous systems. Similarly, polypeptides and antibodies directed to these polypeptides are useful in providing immunological probes for differential identification of the tissue(s) or cell type(s). For a number of disorders of the above tissues or cells, particularly of the reproductive and nervous systems, expression of this gene at significantly higher or lower levels may be routinely detected in certain tissues or cell types (e.g. reproductive, CNS, cancerous and wounded tissues) or bodily fluids (e.g., lymph, serum, plasma, urine, synovial fluid and spinal fluid) or another tissue or cell sample taken from an individual having such a disorder, relative to the standard gene expression level, i.e., the expression level in healthy tissue or bodily fluid from an individual not having the disorder.

[1473] Predicted epitopes include those comprising a sequence shown in SEQ ID NO:444 as residues: Arg-13 to Asp-21, Lys-28 to Lys-38, Val-76 to Asp-81, Ser-99 to Ala-107, Pro-130 to Phe-136, Thr-143 to Ile-150, Pro-176 to Phe-182, Asn-186 to Gly-196, Ala-202 to Phe-214.

[1474] The tissue distribution in human hippocampus, prostate, and frontal cortex, combined with the homology to human M-phase phosphoprotein 4 indicates that the protein product of this gene is useful for the diagnosis and treatment of reproductive and nervous system disorders. Furthermore, elevated expression of this gene product within the frontal cortex of the brain indicates that it may be involved in neuronal survival; synapse formation; conductance; neural differentiation, etc. Such involvement may impact many processes, such as learning and cognition. It may also be useful in the treatment of such neurodegenerative disorders as schizophrenia; ALS; or Alzheimer's. Protein, as well as, antibodies directed against the protein may show utility as a tissue-specific marker and/or immunotherapy target for the above listed tissues.

[1475] Many polynucleotide sequences, such as EST sequences, are publicly available and accessible through sequence databases. Some of these sequences are related to SEQ ID NO:206 and may have been publicly available prior to conception of the present invention. Preferably, such related polynucleotides are specifically excluded from the scope of the present invention. To list every related sequence is cumbersome. Accordingly, preferably excluded from the present invention are one or more polynucleotides comprising a nucleotide sequence described by the general formula of a-b, where a is any integer between 1 to 2451 of SEQ ID NO:206, b is an integer of 15 to 2465, where both a and b correspond to the positions of nucleotide residues shown in SEQ ID NO:206, and where b is greater than or equal to a+14.

[1476] Features of Protein Encoded by Gene No: 197

[1477] In specific embodiments, polypeptides of the invention comprise, or alternatively consists of, an amino acid sequence selected from the group: MGSQHSAAARPSSCRRKQEDDRDG (SEQ ID NO:1212), LLAEREQEEAIAQFPYVEFTGRDSITCLTC (SEQ ID NO:1213), and/or QGTGYIPTEQVNELVALI PHSDQRLRPQRTKQYV (SEQ ID NO:1214). Moreover, fragments and variants of these polypeptides (such as, for example, fragments as described herein, polypeptides at least 80%, 85%, 90%, 95%, 96%, 97%, 98%, or 99% identical to these polypeptides and polypeptides encoded by the polynucleotide which hybridizes, under stringent conditions, to the polynucleotide encoding these polypeptides) are encompassed by the invention. Antibodies that bind polypeptides of the invention are also encompassed by the invention. Polynucleotides encoding these polypeptides are also encompassed by the invention.

[1478] This gene is expressed primarily in human primary breast cancer, and to a lesser extent, in human adult spleen, Hodgkin's lymphoma I, and salivary gland.

[1479] Polynucleotides and polypeptides of the invention are useful as reagents for differential identification of the tissue(s) or cell type(s) present in a biological sample and for diagnosis of diseases and conditions which include, but are not limited to, cancer, as well as immune disorders. Similarly, polypeptides and antibodies directed to these polypeptides are useful in providing immunological probes for differential identification of the tissue(s) or cell type(s). For a number of disorders of the above tissues or cells, particularly cancers and the immune system, expression of this gene at significantly higher or lower levels may be routinely detected in certain tissues or cell types (e.g. immune, cancerous and wounded tissues) or bodily fluids (e.g., lymph, serum, plasma, urine, synovial fluid and spinal fluid) or another tissue or cell sample taken from an individual having such a disorder, relative to the standard gene expression level, i.e., the expression level in healthy tissue or bodily fluid from an individual not having the disorder.

[1480] Predicted epitopes include those comprising a sequence shown in SEQ ID NO:445 as residues: Ser-1126 to Gly-138.

[1481] The tissue distribution in tumors of breast origins indicates that the protein product of this gene is useful for the diagnosis and intervention of these tumors, in addition to other tumors where expression has been indicated. Furthermore, the expression in hematopoietic cells and tissues indicates that this protein may play a role in the proliferation, differentiation, and/or survival of hematopoietic cell lineages. In such an event, this gene may be useful in the treatment of lymphoproliferative disorders, and in the maintenance and differentiation of various hematopoietic lineages from early hematopoietic stem and committed progenitor cells. Protein, as well as, antibodies directed against the protein may show utility as a tissue-specific marker and/or immunotherapy target for the above listed tissues.

[1482] Many polynucleotide sequences, such as EST sequences, are publicly available and accessible through sequence databases. Some of these sequences are related to SEQ ID NO:207 and may have been publicly available prior to conception of the present invention. Preferably, such related polynucleotides are specifically excluded from the scope of the present invention. To list every related sequence is cumbersome. Accordingly, preferably excluded from the present invention are one or more polynucleotides comprising a nucleotide sequence described by the general formula of a-b, where a is any integer between 1 to 1466 of SEQ ID NO:207, b is an integer of 15 to 1480, where both a and b correspond to the positions of nucleotide residues shown in SEQ ID NO:207, and where b is greater than or equal to a+14.

[1483] Features of Protein Encoded by Gene No: 198

[1484] This gene is expressed primarily in monocytes.

[1485] Polynucleotides and polypeptides of the invention are useful as reagents for differential identification of the tissue(s) or cell type(s) present in a biological sample and for diagnosis of diseases and conditions which include, but are not limited to, blood cell disorders. Similarly, polypeptides and antibodies directed to these polypeptides are useful in providing immunological probes for differential identification of the tissue(s) or cell type(s). For a number of disorders of the above tissues or cells, particularly of the immune system, expression of this gene at significantly higher or lower levels may be routinely detected in certain tissues or cell types (e.g. immune, cancerous and wounded tissues) or bodily fluids (e.g., lymph, serum, plasma, urine, synovial fluid and spinal fluid) or another tissue or cell sample taken from an individual having such a disorder, relative to the standard gene expression level, i.e., the expression level in healthy tissue or bodily fluid from an individual not having the disorder.

[1486] The tissue distribution in monocytes indicates that the protein product of this gene is useful for the diagnosis and treatment of blood cell disorders. Furthermore, expression of this gene product in monocytes also strongly indicates a role for this protein in immune function and immune surveillance. Protein, as well as, antibodies directed against the protein may show utility as a tumor marker and/or immunotherapy targets for the above listed tissues.

[1487] Many polynucleotide sequences, such as EST sequences, are publicly available and accessible through sequence databases. Some of these sequences are related to SEQ ID NO:208 and may have been publicly available prior to conception of the present invention. Preferably, such related polynucleotides are specifically excluded from the scope of the present invention. To list every related sequence is cumbersome. Accordingly, preferably excluded from the present invention are one or more polynucleotides comprising a nucleotide sequence described by the general formula of a-b, where a is any integer between 1 to 858 of SEQ ID NO:208, b is an integer of 15 to 872, where both a and b correspond to the positions of nucleotide residues shown in SEQ ID NO:208, and where b is greater than or equal to a+14.

[1488] Features of Protein Encoded by Gene No: 199

[1489] The gene encoding the disclosed cDNA is thought to reside on chromosome 6. Accordingly, polynucleotides related to this invention are useful as a marker in linkage analysis for chromosome 6.

[1490] This gene is expressed primarily in human ovary and synovia, and to a lesser extent in human 8 week whole embryo.

[1491] Polynucleotides and polypeptides of the invention are useful as reagents for differential identification of the tissue(s) or cell type(s) present in a biological sample and for diagnosis of diseases and conditions which include, but are not limited to, reproductive and developmental disorders. Similarly, polypeptides and antibodies directed to these polypeptides are useful in providing immunological probes for differential identification of the tissue(s) or cell type(s). For a number of disorders of the above tissues or cells, particularly of the reproductive and developmental systems, expression of this gene at significantly higher or lower levels may be routinely detected in certain tissues or cell types (e.g. reproductive, developmental, cancerous and wounded tissues) or bodily fluids (e.g., lymph, serum, plasma, urine, synovial fluid and spinal fluid) or another tissue or cell sample taken from an individual having such a disorder, relative to the standard gene expression level, i.e., the expression level in healthy tissue or bodily fluid from an individual not having the disorder.

[1492] The tissue distribution in human ovary and human 8 week whole embryo indicates that the protein product of this gene is useful for the diagnosis and treatment of reproductive and developmental disorders. Similarly, expression within embryonic tissue and other cellular sources marked by proliferating cells indicates that this protein may play a role in the regulation of cellular division, and may show utility in the diagnosis and treatment of cancer and other proliferative disorders. Similarly, embryonic development also involves decisions involving cell differentiation and/or apoptosis in pattern formation. Thus this protein may also be involved in apoptosis or tissue differentiation and could again be useful in cancer therapy. Protein, as well as, antibodies directed against the protein may show utility as a tumor marker and/or immunotherapy targets for the above listed tissues.

[1493] Many polynucleotide sequences, such as EST sequences, are publicly available and accessible through sequence databases. Some of these sequences are related to SEQ ID NO:209 and may have been publicly available prior to conception of the present invention. Preferably, such related polynucleotides are specifically excluded from the scope of the present invention. To list every related sequence is cumbersome. Accordingly, preferably excluded from the present invention are one or more polynucleotides comprising a nucleotide sequence described by the general formula of a-b, where a is any integer between 1 to 1765 of SEQ ID NO:209, b is an integer of 15 to 1779, where both a and b correspond to the positions of nucleotide residues shown in SEQ ID NO:209, and where b is greater than or equal to a+14.

[1494] Features of Protein Encoded by Gene No: 200

[1495] The gene encoding the disclosed cDNA is thought to reside on chromosome 8. Accordingly, polynucleotides related to this invention are useful as a marker in linkage analysis for chromosome 8. The translation product of this gene shares limited sequence homology with collagen proline rich domain.

[1496] This gene is expressed primarily in CNS.

[1497] Polynucleotides and polypeptides of the invention are useful as reagents for differential identification of the tissue(s) or cell type(s) present in a biological sample and for diagnosis of diseases and conditions which include, but are not limited to, neurological diseases. Similarly, polypeptides and antibodies directed to these polypeptides are useful in providing immunological probes for differential identification of the tissue(s) or cell type(s). For a number of disorders of the above tissues or cells, particularly of the nervous system, expression of this gene at significantly higher or lower levels may be routinely detected in certain tissues or cell types (e.g. CNS, cancerous and wounded tissues) or bodily fluids (e.g., lymph, serum, plasma, urine, synovial fluid and spinal fluid) or another tissue or cell sample taken from an individual having such a disorder, relative to the standard gene expression level, i.e., the expression level in healthy tissue or bodily fluid from an individual not having the disorder.

[1498] Predicted epitopes include those comprising a sequence shown in SEQ ID NO:448 as residues: Pro-35 to Asp-41.

[1499] The tissue distribution in tissues of the central nervous system indicates that the protein product of this gene is useful for the diagnosis and treatment of neurological diseases and disorders, such as Alzheimer's Disease, Parkinson's Disease, Huntington's Disease, Tourette's Syndrome, schizophrenia, mania, dementia, paranoia, obsessive compulsive disorder, panic disorder, learning disabilities, ALS, psychoses, autism, and altered behaviors, including disorders in feeding, sleep patterns, balance, and perception. In addition, the gene or gene product may also play a role in the treatment and/or detection of developmental disorders associated with the developing embryo, or sexually-linked disorders. Protein, as well as, antibodies directed against the protein may show utility as a tumor marker and/or immunotherapy targets for the above listed tissues.

[1500] Many polynucleotide sequences, such as EST sequences, are publicly available and accessible through sequence databases. Some of these sequences are related to SEQ ID NO:210 and may have been publicly available prior to conception of the present invention. Preferably, such related polynucleotides are specifically excluded from the scope of the present invention. To list every related sequence is cumbersome. Accordingly, preferably excluded from the present invention are one or more polynucleotides comprising a nucleotide sequence described by the general formula of a-b, where a is any integer between 1 to 2096 of SEQ ID NO:210, b is an integer of 15 to 2110, where both a and b correspond to the positions of nucleotide residues shown in SEQ ID NO:210, and where b is greater than or equal to a+14.

[1501] Features of Protein Encoded by Gene No: 201

[1502] The translation product of this gene shares homology with a mammalian histone H1a protein.

[1503] In specific embodiments, polypeptides of the invention comprise, or alternatively consists of, an amino acid sequence selected from the group: ARLNVGRESLKREMLKSQGVKVSESPMGARHISSWPEGAAFCKKVQGAQMQ FPPRR (SEQ ID NO:1215), ARLNVGPESLKREML (SEQ ID NO:1216), LKSQGV KVSESPMGARHSSW (SEQ ID NO:1217), AFCKKVQGAQMQFPPRR (SEQ ID NO:1218), and/or AFCKKVQGAQMQFPPRR (SEQ ID NO:1219). Moreover, fragments and variants of these polypeptides (such as, for example, fragments as described herein, polypeptides at least 80%, 85%, 90%, 95%, 96%, 97%, 98%, or 99% identical to these polypeptides and polypeptides encoded by the polynucleotide which hybridizes, under stringent conditions, to the polynucleotide encoding these polypeptides) are encompassed by the invention. Antibodies that bind polypeptides of the invention are also encompassed by the invention. Polynucleotides encoding these polypeptides are also encompassed by the invention. (See Genbank Accession No. pir|S24178).

[1504] This gene is expressed primarily in neutrophils.

[1505] Polynucleotides and polypeptides of the invention are useful as reagents for differential identification of the tissue(s) or cell type(s) present in a biological sample and for diagnosis of diseases and conditions which include, but are not limited to, immune disorders. Similarly, polypeptides and antibodies directed to these polypeptides are useful in providing immunological probes for differential identification of the tissue(s) or cell type(s). For a number of disorders of the above tissues or cells, particularly of the immune system, expression of this gene at significantly higher or lower levels may be routinely detected in certain tissues or cell types (e.g. immune, cancerous and wounded tissues) or bodily fluids (e.g., lymph, serum, plasma, urine, synovial fluid and spinal fluid) or another tissue or cell sample taken from an individual having such a disorder, relative to the standard gene expression level, i.e., the expression level in healthy tissue or bodily fluid from an individual not having the disorder.

[1506] The tissue distribution in neutrophils indicates that the protein product of this gene is useful for the diagnosis and treatment of immune disorders. Since the gene is expressed in cells of lymphoid origin, the natural gene product may be involved in vital immune functions. Therefore it may be also used as an agent for immunological disorders including arthritis, asthma, immune deficiency diseases such as AIDS, and leukemia. Furthermore, expression of this gene product in neutrophils also strongly indicates a role for this protein in immune function and immune surveillance. Protein, as well as, antibodies directed against the protein may show utility as a tumor marker and/or immunotherapy targets for the above listed tissues.

[1507] Many polynucleotide sequences, such as EST sequences, are publicly available and accessible through sequence databases. Some of these sequences are related to SEQ ID NO:211 and may have been publicly available prior to conception of the present invention. Preferably, such related polynucleotides are specifically excluded from the scope of the present invention. To list every related sequence is cumbersome. Accordingly, preferably excluded from the present invention are one or more polynucleotides comprising a nucleotide sequence described by the general formula of a-b, where a is any integer between 1 to 924 of SEQ ID NO:211, b is an integer of 15 to 938, where both a and b correspond to the positions of nucleotide residues shown in SEQ ID NO:211, and where b is greater than or equal to a+14.

[1508] Features of Protein Encoded by Gene No: 202

[1509] This gene is expressed primarily in neutrophils.

[1510] Polynucleotides and polypeptides of the invention are useful as reagents for differential identification of the tissue(s) or cell type(s) present in a biological sample and for diagnosis of diseases and conditions which include, but are not limited to, immune disorders. Similarly, polypeptides and antibodies directed to these polypeptides are useful in providing immunological probes for differential identification of the tissue(s) or cell type(s). For a number of disorders of the above tissues or cells, particularly of the immune system, expression of this gene at significantly higher or lower levels may be routinely detected in certain tissues or cell types (e.g. immune, cancerous and wounded tissues) or bodily fluids (e.g., lymph, serum, plasma, urine, synovial fluid and spinal fluid) or another tissue or cell sample taken from an individual having such a disorder, relative to the standard gene expression level, i.e., the expression level in healthy tissue or bodily fluid from an individual not having the disorder.

[1511] The tissue distribution in neutrophils indicates that the protein product of this gene is useful for the diagnosis and treatment of immune disorders. Since the gene is expressed in cells of lymphoid origin, the natural gene product may be involved in immune functions. Therefore it may be also used as an agent for immunological disorders including arthritis, asthma, immune deficiency diseases such as AIDS, and leukemia. Furthermore, expression of this gene product in neutrophils also strongly indicates a role for this protein in immune function and immune surveillance. Protein, as well as, antibodies directed against the protein may show utility as a tumor marker and/or immunotherapy targets for the above listed tissues.

[1512] Many polynucleotide sequences, such as EST sequences, are publicly available and accessible through sequence databases. Some of these sequences are related to SEQ ID NO:212 and may have been publicly available prior to conception of the present invention. Preferably, such related polynucleotides are specifically excluded from the scope of the present invention. To list every related sequence is cumbersome. Accordingly, preferably excluded from the present invention are one or more polynucleotides comprising a nucleotide sequence described by the general formula of a-b, where a is any integer between 1 to 1537 of SEQ ID NO:212, b is an integer of 15 to 1551, where both a and b correspond to the positions of nucleotide residues shown in SEQ ID NO:212, and where b is greater than or equal to a+14.

[1513] Features of Protein Encoded by Gene No: 203

[1514] This gene is expressed primarily in neutrophils.

[1515] Polynucleotides and polypeptides of the invention are useful as reagents for differential identification of the tissue(s) or cell type(s) present in a biological sample and for diagnosis of diseases and conditions which include, but are not limited to, infectious disorders, immune disorders, and cancers. Similarly, polypeptides and antibodies directed to these polypeptides are useful in providing immunological probes for differential identification of the tissue(s) or cell type(s). For a number of disorders of the above tissues or cells, particularly of the immune system, expression of this gene at significantly higher or lower levels may be routinely detected in certain tissues or cell types (e.g. immune, cancerous and wounded tissues) or bodily fluids (e.g., lymph, serum, plasma, urine, synovial fluid and spinal fluid) or another tissue or cell sample taken from an individual having such a disorder, relative to the standard gene expression level, i.e., the expression level in healthy tissue or bodily fluid from an individual not having the disorder.

[1516] Predicted epitopes include those comprising a sequence shown in SEQ ID NO:451 as residues: Thr-31 to Lys-36.

[1517] The tissue distribution in neutrophils indicates that the protein product of this gene is useful for the diagnosis and treatment of infectious disorders, immune disorders, and cancers. Since the gene is expressed in cells of lymphoid origin, the natural gene product may be involved in immune functions. Therefore it may be also used as an agent for immunological disorders including arthritis, asthma, immune deficiency diseases such as AIDS, and leukemia. Expression of this gene product in neutrophils also strongly indicates a role for this protein in immune function and immune surveillance. Protein, as well as, antibodies directed against the protein may show utility as a tumor marker and/or immunotherapy targets for the above listed tissues.

[1518] Many polynucleotide sequences, such as EST sequences, are publicly available and accessible through sequence databases. Some of these sequences are related to SEQ ID NO:213 and may have been publicly available prior to conception of the present invention. Preferably, such related polynucleotides are specifically excluded from the scope of the present invention. To list every related sequence is cumbersome. Accordingly, preferably excluded from the present invention are one or more polynucleotides comprising a nucleotide sequence described by the general formula of a-b, where a is any integer between 1 to 983 of SEQ ID NO:213, b is an integer of 15 to 997, where both a and b correspond to the positions of nucleotide residues shown in SEQ ID NO:213, and where b is greater than or equal to a+14.

[1519] Features of Protein Encoded by Gene No: 204

[1520] The gene encoding the disclosed cDNA is thought to reside on chromosome 16. Accordingly, polynucleotides related to this invention are useful as a marker in linkage analysis for chromosome 16. The translation product of this gene shares sequence homology with lactate dehydrogenase, which is thought to be important in lactate metabolism.

[1521] This gene is expressed primarily in human tonsils, and to a lesser extent, in spleen, and neutrophils.

[1522] Polynucleotides and polypeptides of the invention are useful as reagents for differential identification of the tissue(s) or cell type(s) present in a biological sample and for diagnosis of diseases and conditions which include, but are not limited to, immune disorders, infectious disorders, and cancers. Similarly, polypeptides and antibodies directed to these polypeptides are useful in providing immunological probes for differential identification of the tissue(s) or cell type(s). For a number of disorders of the above tissues or cells, particularly of the immune disorders, infectious disorders, and cancers, expression of this gene at significantly higher or lower levels may be routinely detected in certain tissues or cell types (e.g. tonsils, immune, cancerous and wounded tissues) or bodily fluids (e.g., lymph, serum, plasma, urine, synovial fluid and spinal fluid) or another tissue or cell sample taken from an individual having such a disorder, relative to the standard gene expression level, i.e., the expression level in healthy tissue or bodily fluid from an individual not having the disorder.

[1523] Predicted epitopes include those comprising a sequence shown in SEQ ID NO:452 as residues: Gly-7 to Ser-12.

[1524] The tissue distribution in human tonsils, spleen, and neutrophils, combined with the homology to lactate dehydrogenase gene indicates that the protein product of this gene is useful for the diagnosis and treatment of immune disorders, infectious disorders, and cancers. Furthermore, expression of this gene product in tonsils indicates a role in the regulation of the proliferation; survival; differentiation; and/or activation of potentially all hematopoietic cell lineages, including blood stem cells. This gene product may be involved in the regulation of cytokine production, antigen presentation, or other processes that may also suggest a usefulness in the treatment of cancer (e.g. by boosting immune responses). Since the gene is expressed in cells of lymphoid origin, the gene or protein, as well as, antibodies directed against the protein may show utility as a tumor marker and/or immunotherapy targets for the above listed tissues. Therefore it may be also used as an agent for immunological disorders including arthritis, asthma, immune deficiency diseases such as AIDS, leukemia, rheumatoid arthritis, inflammatory bowel disease, sepsis, acne, and psoriasis. In addition, this gene product may have commercial utility in the expansion of stem cells and committed progenitors of various blood lineages, and in the differentiation and/or proliferation of various cell types. Protein, as well as, antibodies directed against the protein may show utility as a tumor marker and/or immunotherapy targets for the above listed tissues.

[1525] Many polynucleotide sequences, such as EST sequences, are publicly available and accessible through sequence databases. Some of these sequences are related to SEQ ID NO:214 and may have been publicly available prior to conception of the present invention. Preferably, such related polynucleotides are specifically excluded from the scope of the present invention. To list every related sequence is cumbersome. Accordingly, preferably excluded from the present invention are one or more polynucleotides comprising a nucleotide sequence described by the general formula of a-b, where a is any integer between 1 to 1482 of SEQ ID NO:214, b is an integer of 15 to 1496, where both a and b correspond to the positions of nucleotide residues shown in SEQ ID NO:214, and where b is greater than or equal to a+14.

[1526] Features of Protein Encoded by Gene No: 205

[1527] The translation product of this gene shares sequence homology with Gcap1 protein which is developmentally regulated in brain.

[1528] In specific embodiments, polypeptides of the invention comprise, or alternatively consists of, the following amino acid sequence: NFFFVCLFKSSLRLVNSSYTPILCVL (SEQ ID NO:1220). Moreover, fragments and variants of this polypeptide (such as, for example, fragments as described herein, polypeptides at least 80%, 85%, 90%, 95%, 96%, 97%, 98%, or 99% identical to these polypeptides and polypeptides encoded by the polynucleotide which hybridize, under stringent conditions, to the polynucleotide encoding this polypeptide are encompassed by the invention. Antibodies that bind polypeptides of the invention are also encompassed by the invention. Polynucleotides encoding this polypeptide are also encompassed by the invention.

[1529] The gene encoding the disclosed cDNA is thought to reside on chromosome 7. Accordingly, polynucleotides related to this invention are useful as a marker in linkage analysis for chromosome 7.

[1530] This gene is expressed primarily in placenta and endometrial tumors.

[1531] Polynucleotides and polypeptides of the invention are useful as reagents for differential identification of the tissue(s) or cell type(s) present in a biological sample and for diagnosis of diseases and conditions which include, but are not limited to, vasculogenesis/angiogenesis and tumorigenesis. Similarly, polypeptides and antibodies directed to these polypeptides are useful in providing immunological probes for differential identification of the tissue(s) or cell type(s). For a number of disorders of the above tissues or cells, particularly of the vascular system and tumors, expression of this gene at significantly higher or lower levels may be routinely detected in certain tissues or cell types (e.g. placental, cancerous and wounded tissues) or bodily fluids (e.g., lymph, serum, plasma, urine, synovial fluid and spinal fluid) or another tissue or cell sample taken from an individual having such a disorder, relative to the standard gene expression level, i.e., the expression level in healthy tissue or bodily fluid from an individual not having the disorder.

[1532] Predicted epitopes include those comprising a sequence shown in SEQ ID NO:453 as residues: Lys-9 to Gln-16.

[1533] The tissue distribution placenta and endometrial tumors, combined with the homology to Gcap1 protein indicates that the protein product of this gene is useful for the diagnosis and treatment of disorders or dysfunctions of the vascular system, which include, but are not limited to atherosclerosis, hypertension, embolism, thrombosis, microvascular disease, aneurysm, or stroke, or tumorigenesis. Furthermore, the tissue distribution indicates that the protein product of this gene is useful for the diagnosis and/or treatment of disorders of the placenta. Specific expression within the placenta indicates that this gene product may play a role in the proper establishment and maintenance of placental function. Alternately, this gene product may be produced by the placenta and then transported to the embryo, where it may play a crucial role in the development and/or survival of the developing embryo or fetus. Expression of this gene product in a vascular-rich tissue such as the placenta also indicates that this gene product may be produced more generally in endothelial cells or within the circulation. In such instances, it may play more generalized roles in vascular function, such as in angiogenesis. It may also be produced in the vasculature and have effects on other cells within the circulation, such as hematopoietic cells. It may serve to promote the proliferation, survival, activation, and/or differentiation of hematopoietic cells, as well as other cells throughout the body.

[1534] Many polynucleotide sequences, such as EST sequences, are publicly available and accessible through sequence databases. Some of these sequences are related to SEQ ID NO:215 and may have been publicly available prior to conception of the present invention. Preferably, such related polynucleotides are specifically excluded from the scope of the present invention. To list every related sequence is cumbersome. Accordingly, preferably excluded from the present invention are one or more polynucleotides comprising a nucleotide sequence described by the general formula of a-b, where a is any integer between 1 to 1294 of SEQ ID NO:215, b is an integer of 15 to 1308, where both a and b correspond to the positions of nucleotide residues shown in SEQ ID NO:215, and where b is greater than or equal to a+14.

[1535] Features of Protein Encoded by Gene No: 206

[1536] The translation product of this gene shares sequence homology with a C. elegans protein of unknown function (F23B2.4 [Caenorhabditis elegans ]). In specific embodiments, polypeptides of the invention comprise, or alternatively consist of, the following amino acid sequences: VQVLEQLTNNAVAESRFNDAAYYYWMLSMQCLDIAQD (SEQ ID NO:1221), PAQKDTMLGKFYHFQRLAELYHGYHAIHRHTEDP (SEQ ID NO:1222), LAKQSKALGAYRLARHAYDKLRGLYIP (SEQ ID NO:1223), ARFQKSIELGTLTIRAKPFHDSEELVPLCYRCSTNN (SEQ ID NO:1224), PLLNNLGNVCINCRQPFIFSASSYDVLHLVEFYLEEG[TDEEAISLIDLEVLRPK RDDRQLEICKQQLPDSCG (SEQ ID NO:1225) MPYAQWLAENDRFEEAQKAFHKAGRQREA (SEQ ID NO:1226), and/or FSVHRPETLFNISRFLLHSLPKDTPSGISKVKILFT (SEQ ID NO:1227). Moreover, fragments and variants of these polypeptides (such as, for example, fragments as described herein, polypeptides at least 80%, 85%, 90%, 95%, 96%, 97%, 98%, or 99% identical to these polypeptides and polypeptides encoded by the polynucleotide which hybridizes, under stringent conditions, to the polynucleotide encoding these polypeptides) are encompassed by the invention. Antibodies that bind polypeptides of the invention are also encompassed by the invention. Polynucleotides encoding these polypeptides are also encompassed by the invention.

[1537] This gene is expressed primarily in testes.

[1538] Polynucleotides and polypeptides of the invention are useful as reagents for differential identification of the tissue(s) or cell type(s) present in a biological sample and for diagnosis of diseases and conditions which include, but are not limited to, male reproductive and endocrine disorders. Similarly, polypeptides and antibodies directed to these polypeptides are useful in providing immunological probes for differential identification of the tissue(s) or cell type(s). For a number of disorders of the above tissues or cells, particularly of the reproductive and endocrine systems, expression of this gene at significantly higher or lower levels may be routinely detected in certain tissues or cell types (e.g. testes, cancerous and wounded tissues) or bodily fluids (e.g., lymph, serum, seminal fluid, plasma, urine, synovial fluid and spinal fluid) or another tissue or cell sample taken from an individual having such a disorder, relative to the standard gene expression level, i.e., the expression level in healthy tissue or bodily fluid from an individual not having the disorder.

[1539] The tissue distribution in testes indicates that the protein product of this gene is useful for the treatment of male reproductive and endocrine disorders. Furthermore, the tissue distribution indicates that the protein product of this gene is useful for the treatment and diagnosis of conditions concerning proper testicular function (e.g. endocrine function, sperm maturation), as well as cancer. Therefore, this gene product is useful in the treatment of male infertility and/or impotence. This gene product is also useful in assays designed to identify binding agents, as such agents (antagonists/agonists) are useful as male contraceptive agents. Similarly, the protein is believed to be useful in the treatment and/or diagnosis of testicular cancer. The testes are also a site of active gene expression of transcripts that may be expressed, particularly at low levels, in other tissues of the body. Therefore, this gene product may be expressed in other specific tissues or organs where it may play related functional roles in other processes, such as hematopoiesis, inflammation, bone formation, and kidney function, to name a few possible target indications.

[1540] Many polynucleotide sequences, such as EST sequences, are publicly available and accessible through sequence databases. Some of these sequences are related to SEQ ID NO:216 and may have been publicly available prior to conception of the present invention. Preferably, such related polynucleotides are specifically excluded from the scope of the present invention. To list every related sequence is cumbersome. Accordingly, preferably excluded from the present invention are one or more polynucleotides comprising a nucleotide sequence described by the general formula of a-b, where a is any integer between 1 to 1691 of SEQ ID NO:216, b is an integer of 15 to 1705, where both a and b correspond to the positions of nucleotide residues shown in SEQ ID NO:216, and where b is greater than or equal to a+14.

[1541] Features of Protein Encoded by Gene No: 207

[1542] This gene is expressed in fetal lung.

[1543] Polynucleotides and polypeptides of the invention are useful as reagents for differential identification of the tissue(s) or cell type(s) present in a biological sample and for diagnosis of diseases and conditions which include, but are not limited to, lung diseases such as cystic fibrosis. Similarly, polypeptides and antibodies directed to these polypeptides are useful in providing immunological probes for differential identification of the tissue(s) or cell type(s). For a number of disorders of the above tissues or cells, particularly of the respiratory system, expression of this gene at significantly higher or lower levels may be routinely detected in certain tissues or cell types (e.g. respiratory, cancerous and wounded tissues) or bodily fluids (e.g., serum, plasma, urine, synovial fluid and spinal fluid) or another tissue or cell sample taken from an individual having such a disorder, relative to the standard gene expression level, i.e., the expression level in healthy tissue or bodily fluid from an individual not having the disorder.

[1544] Predicted epitopes include those comprising a sequence shown in SEQ ID NO:455 as residues: Tyr-49 to Cys-54.

[1545] The tissue distribution in fetal lung indicates that the protein product of this gene is useful for the detection and treatment of disorders associated with developing lungs, particularly in premature infants where the lungs are the last tissues to develop. The tissue distribution indicates that the protein product of this gene is useful for the diagnosis and intervention of lung tumors, since the gene may be involved in the regulation of cell division, particularly since it is expressed in fetal tissue. Protein, as well as, antibodies directed against the protein may show utility as a tumor marker and immunotherapy targets for the above listed tumors and tissues.

[1546] Many polynucleotide sequences, such as EST sequences, are publicly available and accessible through sequence databases. Some of these sequences are related to SEQ ID NO:217 and may have been publicly available prior to conception of the present invention. Preferably, such related polynucleotides are specifically excluded from the scope of the present invention. To list every related sequence is cumbersome. Accordingly, preferably excluded from the present invention are one or more polynucleotides comprising a nucleotide sequence described by the general formula of a-b, where a is any integer between 1 to 985 of SEQ ID NO:217, b is an integer of 15 to 999, where both a and b correspond to the positions of nucleotide residues shown in SEQ ID NO:217, and where b is greater than or equal to a+14.

TABLE 1

| | | | | | | | | | 5′ NT | | | | | |
|---|---|---|---|---|---|---|---|---|---|---|---|---|---|---|
| | | | | NT | | | | | of | AA | First | Last | | |
| | | ATCC | | SEQ | | 5′ NT | 3′ NT | 5′ NT | First | AA | AA | AA | First | Last |
| | | Deposit | | ID | Total | of | of | of | AA of | ID | of | of | AA of | AA |
| Gene | cDNA | No: Z | | NO: | NT | Clone | Clone | Start | Signal | NO: | Sig | Sig | Secreted | of |
| No. | Clone ID | and Date | Vector | X | Seq. | Seq. | Seq. | Codon | Pep | Y | Pep | Pep | Portion | ORF |
| 1 | HLHDS67 | 97979 | Uni-ZAP XR | 11 | 2526 | 427 | 2526 | 458 | 458 | 249 | 1 | 30 | 31 | 30 |
| | | Mar. 27, 1997 | | | | | | | | | | | | |
| 2 | HLHDZ58 | 97979 | Uni-ZAP XR | 12 | 1131 | 1 | 1131 | 129 | 129 | 250 | 1 | 14 | 15 | 115 |
| | | Mar. 27, 1997 | | | | | | | | | | | | |
| 3 | HLMMJ13 | 97979 | Lambda ZAP | 13 | 941 | 39 | 941 | 62 | 62 | 251 | 1 | 44 | 45 | 102 |
| | | Mar. 27, 1997 | II | | | | | | | | | | | |
| 3 | HLMMJ13 | 97979 | Lambda ZAP | 218 | 941 | 39 | 941 | 245 | 245 | 456 | 1 | 35 | 36 | 41 |
| | | Mar. 27, 1997 | II | | | | | | | | | | | |
| 4 | HLTEI25 | 97979 | Uni-ZAP XR | 14 | 843 | 1 | 843 | 155 | 155 | 252 | 1 | 19 | 20 | 42 |
| | | Mar. 27, 1997 | | | | | | | | | | | | |
| 5 | HMSJX24 | 97979 | Uni-ZAP XR | 15 | 1018 | 1 | 1018 | 90 | 90 | 253 | 1 | 18 | 19 | 36 |
| | | Mar. 27, 1997 | | | | | | | | | | | | |
| 6 | HNFED65 | 97979 | Uni-ZAP XR | 16 | 661 | 1 | 661 | 76 | 76 | 254 | 1 | 28 | 29 | 127 |
| | | Mar. 27, 1997 | | | | | | | | | | | | |
| 7 | HNHDX07 | 97979 | Uni-ZAP XR | 17 | 553 | 1 | 553 | 106 | 106 | 255 | 1 | 23 | 24 | 66 |
| | | Mar. 27, 1997 | | | | | | | | | | | | |
| 8 | HNHGC82 | 97979 | Uni-ZAP XR | 18 | 869 | 1 | 869 | 101 | 101 | 256 | 1 | 21 | 22 | 68 |
| | | Mar. 27, 1997 | | | | | | | | | | | | |
| 9 | HNHGO09 | 97979 | Uni-ZAP XR | 19 | 959 | 1 | 959 | 176 | 176 | 257 | 1 | 21 | 22 | 43 |
| | | Mar. 27, 1997 | | | | | | | | | | | | |
| 10 | HOUBE18 | 97979 | Uni-ZAP XR | 20 | 1446 | 1 | 1446 | 101 | 101 | 258 | 1 | 27 | 28 | 50 |
| | | Mar. 27, 1997 | | | | | | | | | | | | |
| 11 | HOUDL69 | 97979 | Uni-ZAP XR | 21 | 1471 | 579 | 1460 | 692 | 692 | 259 | 1 | 31 | 32 | 42 |
| | | Mar. 27, 1997 | | | | | | | | | | | | |
| 12 | HPMFI71 | 97979 | Uni-ZAP XR | 22 | 1402 | 242 | 1402 | 401 | 401 | 260 | 1 | 32 | 33 | 60 |
| | | Mar. 27, 1997 | | | | | | | | | | | | |
| 13 | HPMGQ55 | 97979 | Uni-ZAP XR | 23 | 1047 | 1 | 1047 | 164 | 164 | 261 | 1 | 26 | 27 | 35 |
| | | Mar. 27, 1997 | | | | | | | | | | | | |
| 14 | HPQAC69 | 97979 | Lambda ZAP | 24 | 990 | 1 | 988 | 82 | 82 | 262 | 1 | 20 | 21 | 37 |
| | | Mar. 27, 1997 | II | | | | | | | | | | | |
| 15 | HPTBB03 | 97979 | Uni-ZAP XR | 25 | 1208 | 350 | 1173 | 398 | 398 | 263 | 1 | 29 | 30 | 210 |
| | | Mar. 27, 1997 | | | | | | | | | | | | |
| 16 | HPTWA66 | 97979 | pBluescript | 26 | 1922 | 1381 | 1922 | 24 | 24 | 264 | 1 | 33 | 34 | 547 |
| | | Mar. 27, 1997 | | | | | | | | | | | | |
| 16 | HPTWA66 | 97979 | pBluescript | 219 | 575 | 1 | 575 | 148 | 148 | 457 | 1 | 22 | 23 | 65 |
| | | Mar. 27, 1997 | | | | | | | | | | | | |
| 17 | HPTWC08 | 97979 | pBluescript | 27 | 1951 | 1422 | 1874 | 219 | 219 | 265 | 1 | 19 | 20 | 299 |
| | | Mar. 27, 1997 | | | | | | | | | | | | |
| 18 | HRGCZ46 | 97979 | Uni-ZAP XR | 28 | 3989 | 2635 | 3989 | | 2748 | 266 | 1 | 16 | 17 | 39 |
| | | Mar. 27, 1997 | | | | | | | | | | | | |
| 19 | HSAVU34 | 97979 | Uni-ZAP XR | 29 | 3735 | 2966 | 3735 | 272 | 272 | 267 | 1 | 30 | 31 | 594 |
| | | Mar. 27, 1997 | | | | | | | | | | | | |
| 19 | HSAVU34 | 97979 | Uni-ZAP XR | 220 | 3018 | 1929 | 3018 | 26 | 26 | 458 | 1 | 1 | 2 | 156 |
| | | Mar. 27, 1997 | | | | | | | | | | | | |
| 20 | HSDFW61 | 97974 | Uni-ZAP XR | 30 | 1667 | 59 | 1625 | 138 | 138 | 268 | 1 | 32 | 33 | 130 |
| | | Apr. 04, 1997 | | | | | | | | | | | | |
| | | 209080 | | | | | | | | | | | | |
| | | May 29, 1997 | | | | | | | | | | | | |
| 21 | HSDGP60 | 97974 | Uni-ZAP XR | 31 | 1408 | 1 | 1408 | 285 | 285 | 269 | 1 | | | 20 |
| | | Apr. 04, 1997 | | | | | | | | | | | | |
| | | 209080 | | | | | | | | | | | | |
| | | May 29, 1997 | | | | | | | | | | | | |
| 22 | HSOAJ55 | 97974 | Uni-ZAP XR | 32 | 3186 | 2402 | 3186 | 302 | 302 | 270 | 1 | 43 | 44 | 159 |
| | | Apr. 04, 1997 | | | | | | | | | | | | |
| | | 209080 | | | | | | | | | | | | |
| | | May 29, 1997 | | | | | | | | | | | | |
| 22 | HSOAJ55 | 97974 | Uni-ZAP XR | 221 | 2031 | 1273 | 2031 | 1285 | 1285 | 459 | 1 | 29 | 30 | 30 |
| | | Apr. 04, 1997 | | | | | | | | | | | | |
| | | 209080 | | | | | | | | | | | | |
| | | May 29, 1997 | | | | | | | | | | | | |
| 23 | HSQEO84 | 97974 | Uni-ZAP XR | 33 | 971 | 13 | 971 | 91 | 91 | 271 | 1 | 19 | 20 | 218 |
| | | Apr. 04, 1997 | | | | | | | | | | | | |
| | | 209080 | | | | | | | | | | | | |
| | | May 29, 1997 | | | | | | | | | | | | |
| 23 | HSQEO84 | 97974 | Uni-ZAP XR | 222 | 968 | 8 | 968 | 86 | 86 | 460 | 1 | 20 | 21 | 56 |
| | | Apr. 04, 1997 | | | | | | | | | | | | |
| | | 209080 | | | | | | | | | | | | |
| | | May 29, 1997 | | | | | | | | | | | | |
| 24 | HSXAM05 | 97974 | Uni-ZAP XR | 34 | 1792 | 369 | 1792 | 470 | 470 | 272 | 1 | 26 | 27 | 49 |
| | | Apr. 04, 1997 | | | | | | | | | | | | |
| | | 209080 | | | | | | | | | | | | |
| | | May 29, 1997 | | | | | | | | | | | | |
| 25 | HSXAS67 | 97974 | Uni-ZAP XR | 35 | 896 | 1 | 896 | 96 | 96 | 273 | 1 | 32 | 33 | 121 |
| | | Apr. 04, 1997 | | | | | | | | | | | | |
| | | 209080 | | | | | | | | | | | | |
| | | May 29, 1997 | | | | | | | | | | | | |
| 26 | HTDAF28 | 97974 | pSport1 | 36 | 912 | 1 | 912 | 38 | 38 | 274 | 1 | 22 | 23 | 87 |
| | | Apr. 04, 1997 | | | | | | | | | | | | |
| | | 209080 | | | | | | | | | | | | |
| | | May 29, 1997 | | | | | | | | | | | | |
| 27 | HTEGQ64 | 97974 | Uni-ZAP XR | 37 | 1382 | 67 | 1382 | 271 | 271 | 275 | 1 | | | 25 |
| | | Apr. 04, 1997 | | | | | | | | | | | | |
| | | 209080 | | | | | | | | | | | | |
| | | May 29, 1997 | | | | | | | | | | | | |
| 28 | HTGEU09 | 97974 | Uni-ZAP XR | 38 | 872 | 1 | 872 | 74 | 74 | 276 | 1 | 18 | 19 | 28 |
| | | Apr. 04, 1997 | | | | | | | | | | | | |
| | | 209080 | | | | | | | | | | | | |
| | | May 29, 1997 | | | | | | | | | | | | |
| 29 | HTOAM21 | 97974 | Uni-ZAP XR | 39 | 812 | 1 | 812 | 41 | 41 | 277 | 1 | 30 | 31 | 43 |
| | | Apr. 04, 1997 | | | | | | | | | | | | |
| | | 209080 | | | | | | | | | | | | |
| | | May 29, 1997 | | | | | | | | | | | | |
| 30 | HTPBW79 | 209511 | Uni-ZAP XR | 40 | 1515 | 118 | 1507 | 302 | 302 | 278 | 1 | 24 | 25 | 362 |
| | | Dec. 03, 1997 | | | | | | | | | | | | |
| 30 | HTSEV09 | 97974 | pBluescript | 223 | 1404 | 1 | 1265 | 92 | 92 | 461 | 1 | 19 | 20 | 415 |
| | | Apr. 04, 1997 | | | | | | | | | | | | |
| | | 209080 | | | | | | | | | | | | |
| | | May 29, 1997 | | | | | | | | | | | | |
| 31 | HJPCD40 | 97974 | Uni-ZAP XR | 41 | 704 | 22 | 704 | | 117 | 279 | 1 | 18 | 19 | 127 |
| | | Apr. 04, 1997 | | | | | | | | | | | | |
| | | 209080 | | | | | | | | | | | | |
| | | May 29, 1997 | | | | | | | | | | | | |
| 32 | HTWBY48 | 97974 | pSport1 | 42 | 1094 | 1 | 1094 | 32 | 32 | 280 | 1 | 34 | 35 | 53 |
| | | Apr. 04, 1997 | | | | | | | | | | | | |
| | | 209080 | | | | | | | | | | | | |
| | | May 29, 1997 | | | | | | | | | | | | |
| 33 | HTWCI46 | 97974 | pSport1 | 43 | 1821 | 892 | 1647 | 56 | 56 | 281 | 1 | 26 | 27 | 29 |
| | | Apr. 04, 1997 | | | | | | | | | | | | |
| | | 209080 | | | | | | | | | | | | |
| | | May 29, 1997 | | | | | | | | | | | | |
| 34 | HTXGI75 | 97974 | Uni-ZAP XR | 44 | 1024 | 30 | 1024 | | 167 | 282 | 1 | 20 | 21 | 25 |
| | | Apr. 04, 1997 | | | | | | | | | | | | |
| | | 209080 | | | | | | | | | | | | |
| | | May 29, 1997 | | | | | | | | | | | | |
| 35 | HWTBF59 | 97974 | Uni-ZAP XR | 45 | 983 | 779 | 983 | 85 | 85 | 283 | 1 | 30 | 31 | 221 |
| | | Apr. 04, 1997 | | | | | | | | | | | | |
| | | 209080 | | | | | | | | | | | | |
| | | May 29, 1997 | | | | | | | | | | | | |
| 35 | HWTBF59 | 97974 | Uni-ZAP XR | 224 | 707 | 488 | 707 | 514 | 514 | 462 | 1 | 41 | 42 | 64 |
| | | Apr. 04, 1997 | | | | | | | | | | | | |
| | | 209080 | | | | | | | | | | | | |
| | | May 29, 1997 | | | | | | | | | | | | |
| 36 | HADAE74 | 97974 | pSport1 | 46 | 2421 | 664 | 1587 | 2110 | 2110 | 284 | 1 | 33 | 34 | 40 |
| | | Apr. 04, 1997 | | | | | | | | | | | | |
| | | 209080 | | | | | | | | | | | | |
| | | May 29, 1997 | | | | | | | | | | | | |
| 37 | HAGFB60 | 97974 | Uni-ZAP XR | 47 | 840 | 1 | 840 | 97 | 97 | 285 | 1 | 30 | 31 | 48 |
| | | Apr. 04, 1997 | | | | | | | | | | | | |
| | | 209080 | | | | | | | | | | | | |
| | | May 29, 1997 | | | | | | | | | | | | |
| 38 | HATEF60 | 97974 | Uni-ZAP XR | 48 | 2432 | 1193 | 2246 | 1491 | 1491 | 286 | 1 | 17 | 18 | 51 |
| | | Apr. 04, 1997 | | | | | | | | | | | | |
| | | 209080 | | | | | | | | | | | | |
| | | May 29, 1997 | | | | | | | | | | | | |
| 39 | HBMSN25 | 97974 | Uni-ZAP XR | 49 | 1742 | 1165 | 1742 | 1207 | 1207 | 287 | 1 | 23 | 24 | 31 |
| | | Apr. 04, 1997 | | | | | | | | | | | | |
| | | 209080 | | | | | | | | | | | | |
| | | May 29, 1997 | | | | | | | | | | | | |
| 40 | HCDAR68 | 97974 | Uni-ZAP XR | 50 | 1487 | 181 | 1455 | 325 | 325 | 288 | 1 | 35 | 36 | 56 |
| | | Apr. 04, 1997 | | | | | | | | | | | | |
| | | 209080 | | | | | | | | | | | | |
| | | May 29, 1997 | | | | | | | | | | | | |
| 41 | HCE3J79 | 97974 | Uni-ZAP XR | 51 | 1328 | 251 | 1328 | 525 | 525 | 289 | 1 | | | 21 |
| | | Apr. 04, 1997 | | | | | | | | | | | | |
| | | 209080 | | | | | | | | | | | | |
| | | May 29, 1997 | | | | | | | | | | | | |
| 42 | HMDAN54 | 97974 | Uni-ZAP XR | 52 | 1856 | 725 | 1853 | 928 | 928 | 290 | 1 | 33 | 34 | 50 |
| | | Apr. 04, 1997 | | | | | | | | | | | | |
| | | 209080 | | | | | | | | | | | | |
| | | May 29, 1997 | | | | | | | | | | | | |
| 43 | HCECA49 | 97974 | Uni-ZAP XR | 53 | 1558 | 310 | 1408 | 109 | 109 | 291 | 1 | 30 | 31 | 98 |
| | | Apr. 04, 1997 | | | | | | | | | | | | |
| | | 209080 | | | | | | | | | | | | |
| | | May 29, 1997 | | | | | | | | | | | | |
| 44 | HCEEC15 | 97974 | Uni-ZAP XR | 54 | 948 | 1 | 948 | 9 | 9 | 292 | 1 | 23 | 24 | 65 |
| | | Apr. 04, 1997 | | | | | | | | | | | | |
| | | 209080 | | | | | | | | | | | | |
| | | May 29, 1997 | | | | | | | | | | | | |
| 45 | HCESF40 | 97974 | pBluescript | 55 | 990 | 99 | 990 | 193 | 193 | 293 | 1 | 32 | 33 | 256 |
| | | Apr. 04, 1997 | | | | | | | | | | | | |
| | | 209080 | | | | | | | | | | | | |
| | | May 29, 1997 | | | | | | | | | | | | |
| 45 | HCESF40 | 97974 | pBluescript | 225 | 1384 | 99 | 1384 | 193 | 193 | 463 | 1 | 32 | 33 | 205 |
| | | Apr. 04, 1997 | | | | | | | | | | | | |
| | | 209080 | | | | | | | | | | | | |
| | | May 29, 1997 | | | | | | | | | | | | |
| 46 | HCFMV39 | 97974 | pSport1 | 56 | 1603 | 1 | 1296 | 96 | 96 | 294 | 1 | 29 | 30 | 102 |
| | | Apr. 04, 1997 | | | | | | | | | | | | |
| | | 209080 | | | | | | | | | | | | |
| | | May 29, 1997 | | | | | | | | | | | | |
| 47 | HCMSX86 | 97975 | Uni-ZAP XR | 57 | 1052 | 5 | 786 | 12 | 12 | 295 | 1 | 28 | 29 | 32 |
| | | Apr. 04, 1997 | | | | | | | | | | | | |
| | | 209081 | | | | | | | | | | | | |
| | | May 29, 1997 | | | | | | | | | | | | |
| 48 | HCNAP62 | 97975 | Lambda ZAP | 58 | 814 | 1 | 558 | 93 | 93 | 296 | 1 | 22 | 23 | 42 |
| | | Apr. 04, 1997 | II | | | | | | | | | | | |
| | | 209081 | | | | | | | | | | | | |
| | | May 29, 1997 | | | | | | | | | | | | |
| 49 | HCRAF32 | 97975 | Uni-ZAP XR | 59 | 1215 | 257 | 1215 | | 356 | 297 | 1 | 19 | 20 | 20 |
| | | Apr. 04, 1997 | | | | | | | | | | | | |
| | | 209081 | | | | | | | | | | | | |
| | | May 29, 1997 | | | | | | | | | | | | |
| 50 | HCUDC07 | 97975 | ZAP Express | 60 | 478 | 1 | 478 | 147 | 147 | 298 | 1 | 36 | 37 | 69 |
| | | Apr. 04, 1997 | | | | | | | | | | | | |
| | | 209081 | | | | | | | | | | | | |
| | | May 29, 1997 | | | | | | | | | | | | |
| 51 | HCWBB42 | 97975 | ZAP Express | 61 | 618 | 1 | 618 | 212 | 212 | 299 | 1 | 35 | 36 | 74 |
| | | Apr. 04, 1997 | | | | | | | | | | | | |
| | | 209081 | | | | | | | | | | | | |
| | | May 29, 1997 | | | | | | | | | | | | |
| 52 | HDTAB05 | 97975 | pCMVSport | 62 | 751 | 1 | 751 | 257 | 257 | 300 | 1 | 21 | 22 | 32 |
| | | Apr. 04, 1997 | 2.0 | | | | | | | | | | | |
| | | 209081 | | | | | | | | | | | | |
| | | May 29, 1997 | | | | | | | | | | | | |
| 53 | HE2AV74 | 97975 | Uni-ZAP XR | 63 | 780 | 283 | 780 | | 433 | 301 | 1 | | | 16 |
| | | Apr. 04, 1997 | | | | | | | | | | | | |
| | | 209081 | | | | | | | | | | | | |
| | | May 29, 1997 | | | | | | | | | | | | |
| 54 | HE2AY71 | 97975 | Uni-ZAP XR | 64 | 588 | 21 | 588 | 169 | 169 | 302 | 1 | | | 16 |
| | | Apr. 04, 1997 | | | | | | | | | | | | |
| | | 209081 | | | | | | | | | | | | |
| | | May 29, 1997 | | | | | | | | | | | | |
| 55 | HE2GS36 | 97975 | Uni-ZAP XR | 65 | 945 | 1 | 349 | 520 | 520 | 303 | 1 | 39 | 40 | 111 |
| | | Apr. 04, 1997 | | | | | | | | | | | | |
| | | 209081 | | | | | | | | | | | | |
| | | May 29, 1997 | | | | | | | | | | | | |
| 55 | HE2GS36 | 97975 | Uni-ZAP XR | 226 | 774 | 272 | 774 | 445 | 445 | 464 | 1 | | | 37 |
| | | Apr. 04, 1997 | | | | | | | | | | | | |
| | | 209081 | | | | | | | | | | | | |
| | | May 29, 1997 | | | | | | | | | | | | |
| 56 | HE2OF09 | 97975 | Uni-ZAP XR | 66 | 1866 | 1313 | 1866 | 1596 | 1596 | 304 | 1 | | | 11 |
| | | Apr. 04, 1997 | | | | | | | | | | | | |
| | | 209081 | | | | | | | | | | | | |
| | | May 29, 1997 | | | | | | | | | | | | |
| 57 | HE6EU50 | 97975 | Uni-ZAP XR | 67 | 1152 | 117 | 686 | 237 | 237 | 305 | 1 | 20 | 21 | 34 |
| | | Apr. 04, 1997 | | | | | | | | | | | | |
| | | 209081 | | | | | | | | | | | | |
| | | May 29, 1997 | | | | | | | | | | | | |
| 58 | HE9HU17 | 97975 | Uni-ZAP XR | 68 | 2483 | 1577 | 2448 | 1620 | 1620 | 306 | 1 | | | 14 |
| | | Apr. 04, 1997 | | | | | | | | | | | | |
| | | 209081 | | | | | | | | | | | | |
| | | May 29, 1997 | | | | | | | | | | | | |
| 59 | HE9ND48 | 97975 | Uni-ZAP XR | 69 | 536 | 1 | 536 | 83 | 83 | 307 | 1 | 36 | 37 | 43 |
| | | Apr. 04, 1997 | | | | | | | | | | | | |
| | | 209081 | | | | | | | | | | | | |
| | | May 29, 1997 | | | | | | | | | | | | |
| 60 | HEBBW11 | 97975 | Uni-ZAP XR | 70 | 574 | 97 | 564 | 109 | 109 | 308 | 1 | 55 | 56 | 137 |
| | | Apr. 04, 1997 | | | | | | | | | | | | |
| | | 209081 | | | | | | | | | | | | |
| | | May 29, 1997 | | | | | | | | | | | | |
| 60 | HEBBW11 | 97975 | Uni-ZAP XR | 227 | 865 | 647 | 865 | | 388 | 465 | 1 | 30 | 31 | 135 |
| | | Apr. 04, 1997 | | | | | | | | | | | | |
| | | 209081 | | | | | | | | | | | | |
| | | May 29, 1997 | | | | | | | | | | | | |
| 61 | HELDY74 | 97975 | Uni-ZAP XR | 71 | 932 | 1 | 932 | 201 | 201 | 309 | 1 | 17 | 18 | 33 |
| | | Apr. 04, 1997 | | | | | | | | | | | | |
| | | 209081 | | | | | | | | | | | | |
| | | May 29, 1997 | | | | | | | | | | | | |
| 62 | HEMAE80 | 97975 | Uni-ZAP XR | 72 | 996 | 1 | 945 | 12 | 12 | 310 | 1 | 24 | 25 | 136 |
| | | Apr. 04, 1997 | | | | | | | | | | | | |
| | | 209081 | | | | | | | | | | | | |
| | | May 29, 1997 | | | | | | | | | | | | |
| 63 | HFEBA88 | 97975 | Uni-ZAP XR | 73 | 785 | 464 | 785 | 356 | 356 | 311 | 1 | 29 | 30 | 57 |
| | | Apr. 04, 1997 | | | | | | | | | | | | |
| | | 209081 | | | | | | | | | | | | |
| | | May 29, 1997 | | | | | | | | | | | | |
| 64 | HFGAB89 | 97975 | Uni-ZAP XR | 74 | 1069 | 196 | 1047 | 295 | 295 | 312 | 1 | 32 | 33 | 34 |
| | | Apr. 04, 1997 | | | | | | | | | | | | |
| | | 209081 | | | | | | | | | | | | |
| | | May 29, 1997 | | | | | | | | | | | | |
| 65 | HFVHY45 | 97975 | pBluescript | 75 | 831 | 1 | 831 | 50 | 50 | 313 | 1 | 36 | 37 | 89 |
| | | Apr. 04, 1997 | | | | | | | | | | | | |
| | | 209081 | | | | | | | | | | | | |
| | | May 29, 1997 | | | | | | | | | | | | |
| 66 | HGBAJ93 | 97975 | Uni-ZAP XR | 76 | 590 | 1 | 590 | 233 | 233 | 314 | 1 | 38 | 39 | 94 |
| | | Apr. 04, 1997 | | | | | | | | | | | | |
| | | 209081 | | | | | | | | | | | | |
| | | May 29, 1997 | | | | | | | | | | | | |
| 67 | HGBBQ69 | 97975 | Uni-ZAP XR | 77 | 1274 | 1 | 1273 | 105 | 105 | 315 | 1 | 24 | 25 | 43 |
| | | Apr. 04, 1997 | | | | | | | | | | | | |
| | | 209081 | | | | | | | | | | | | |
| | | May 29, 1997 | | | | | | | | | | | | |
| 68 | HHFCF08 | 97975 | Uni-ZAP XR | 78 | 1133 | 4 | 1042 | 175 | 175 | 316 | 1 | 23 | 24 | 30 |
| | | Apr. 04, 1997 | | | | | | | | | | | | |
| | | 209081 | | | | | | | | | | | | |
| | | May 29, 1997 | | | | | | | | | | | | |
| 69 | HHFHJ59 | 97975 | Uni-ZAP XR | 79 | 661 | 1 | 661 | 192 | 192 | 317 | 1 | 29 | 30 | 112 |
| | | Apr. 04, 1997 | | | | | | | | | | | | |
| | | 209081 | | | | | | | | | | | | |
| | | May 29, 1997 | | | | | | | | | | | | |
| 70 | HHFHR32 | 97975 | Uni-ZAP XR | 80 | 1378 | 1 | 1378 | 58 | 58 | 318 | 1 | 25 | 26 | 235 |
| | | Apr. 04, 1997 | | | | | | | | | | | | |
| | | 209081 | | | | | | | | | | | | |
| | | May 29, 1997 | | | | | | | | | | | | |
| 71 | HHGCN69 | 97975 | Lambda ZAP | 81 | 1440 | 298 | 1440 | 532 | 532 | 319 | 1 | 23 | 24 | 34 |
| | | Apr. 04, 1997 | II | | | | | | | | | | | |
| | | 209081 | | | | | | | | | | | | |
| | | May 29, 1997 | | | | | | | | | | | | |
| 72 | HHGDO13 | 97975 | Lambda ZAP | 82 | 1381 | 766 | 1371 | 993 | 993 | 320 | 1 | 23 | 24 | 34 |
| | | Apr. 04, 1997 | II | | | | | | | | | | | |
| | | 209081 | | | | | | | | | | | | |
| | | May 29, 1997 | | | | | | | | | | | | |
| 73 | HHPFD63 | 97975 | Uni-ZAP XR | 83 | 1706 | 182 | 1644 | 257 | 257 | 321 | 1 | 24 | 25 | 81 |
| | | Apr. 04, 1997 | | | | | | | | | | | | |
| | | 209081 | | | | | | | | | | | | |
| | | May 29, 1997 | | | | | | | | | | | | |
| 74 | HHSEG23 | 97976 | Uni-ZAP XR | 84 | 573 | 1 | 573 | 160 | 160 | 322 | 1 | 18 | 19 | 71 |
| | | Apr. 04, 1997 | | | | | | | | | | | | |
| 75 | HJPAV06 | 97976 | Uni-ZAP XR | 85 | 684 | 199 | 684 | 323 | 323 | 323 | 1 | 27 | 28 | 33 |
| | | Apr. 04, 1997 | | | | | | | | | | | | |
| 76 | HKIXL73 | 97976 | pBluescript | 86 | 1036 | 591 | 1036 | 690 | 690 | 324 | 1 | 32 | 33 | 114 |
| | | Apr. 04, 1997 | | | | | | | | | | | | |
| 77 | HKMNC43 | 97976 | pBluescript | 87 | 908 | 1 | 908 | 139 | 139 | 325 | 1 | 18 | 19 | 108 |
| | | Apr. 04, 1997 | | | | | | | | | | | | |
| 78 | HMEJE31 | 97976 | Lambda ZAP | 88 | 655 | 1 | 655 | 165 | 165 | 326 | 1 | 33 | 34 | 64 |
| | | Apr. 04, 1997 | II | | | | | | | | | | | |
| 79 | HMSKS35 | 97976 | Uni-ZAP XR | 89 | 1102 | 1 | 1102 | 228 | 228 | 327 | 1 | 23 | 24 | 49 |
| | | Apr. 04, 1997 | | | | | | | | | | | | |
| 79 | HMSKS35 | 97976 | Uni-ZAP XR | 228 | 1102 | 1 | 1102 | 228 | 228 | 466 | 1 | 26 | 27 | 49 |
| | | Apr. 04, 1997 | | | | | | | | | | | | |
| 80 | HNFAE54 | 97976 | Uni-ZAP XR | 90 | 1533 | 665 | 1518 | 347 | 347 | 328 | 1 | 26 | 27 | 293 |
| | | Apr. 04, 1997 | | | | | | | | | | | | |
| 81 | HNFJH45 | 97976 | Uni-ZAP XR | 91 | 575 | 1 | 575 | 275 | 275 | 329 | 1 | 30 | 31 | 67 |
| | | Apr. 04, 1997 | | | | | | | | | | | | |
| 82 | HNGBT31 | 97976 | Uni-ZAP XR | 92 | 639 | 1 | 639 | 224 | 224 | 330 | 1 | 28 | 29 | 104 |
| | | Apr. 04, 1997 | | | | | | | | | | | | |
| 83 | HNGIN60 | 97976 | Uni-ZAP XR | 93 | 858 | 1 | 858 | 239 | 239 | 331 | 1 | 23 | 24 | 58 |
| | | Apr. 04, 1997 | | | | | | | | | | | | |
| 83 | HNGIN60 | 97976 | Uni-ZAP XR | 229 | 744 | 1 | 744 | 225 | 225 | 467 | 1 | 43 | 44 | 70 |
| | | Apr. 04, 1997 | | | | | | | | | | | | |
| 84 | HNGJG84 | 97976 | Uni-ZAP XR | 94 | 526 | 1 | 526 | 268 | 268 | 332 | 1 | 29 | 30 | 38 |
| | | Apr. 04, 1997 | | | | | | | | | | | | |
| 85 | HNHDW42 | 97976 | Uni-ZAP XR | 95 | 426 | 1 | 426 | 168 | 168 | 333 | 1 | 28 | 29 | 71 |
| | | Apr. 04, 1997 | | | | | | | | | | | | |
| 86 | HNHFL57 | 97976 | Uni-ZAP XR | 96 | 844 | 1 | 844 | 98 | 98 | 334 | 1 | 25 | 26 | 61 |
| | | Apr. 04, 1997 | | | | | | | | | | | | |
| 87 | HOGAR52 | 97977 | pCMVSport | 97 | 1985 | 453 | 1985 | 533 | 533 | 335 | 1 | 17 | 18 | 285 |
| | | Apr. 04, 1997 | 2.0 | | | | | | | | | | | |
| | | 209082 | | | | | | | | | | | | |
| | | May 29, 1997 | | | | | | | | | | | | |
| 88 | HOSBZ55 | 97977 | Uni-ZAP XR | 98 | 1416 | 69 | 1416 | 246 | 246 | 336 | 1 | 32 | 33 | 54 |
| | | Apr. 04, 1997 | | | | | | | | | | | | |
| | | 209082 | | | | | | | | | | | | |
| | | May 29, 1997 | | | | | | | | | | | | |
| 89 | HOSDI92 | 97977 | Uni-ZAP XR | 99 | 1760 | 1469 | 1760 | 934 | 934 | 337 | 1 | 22 | 23 | 59 |
| | | Apr. 04, 1997 | | | | | | | | | | | | |
| | | 209082 | | | | | | | | | | | | |
| | | May 29, 1997 | | | | | | | | | | | | |
| 89 | HOSDI92 | 97977 | Uni-ZAP XR | 230 | 1935 | 141 | 772 | | 274 | 468 | 1 | 20 | 21 | 58 |
| | | Apr. 04, 1997 | | | | | | | | | | | | |
| | | 209082 | | | | | | | | | | | | |
| | | May 29, 1997 | | | | | | | | | | | | |
| 90 | HPBCU51 | 97977 | pBluescript | 100 | 599 | 1 | 599 | 86 | 86 | 338 | 1 | 27 | 28 | 119 |
| | | Apr. 04, 1997 | SK- | | | | | | | | | | | |
| | | 209082 | | | | | | | | | | | | |
| | | May 29, 1997 | | | | | | | | | | | | |
| 91 | HPCAL49 | 97977 | Uni-ZAP XR | 101 | 784 | 1 | 784 | 113 | 113 | 339 | 1 | 36 | 37 | 38 |
| | | Apr. 04, 1997 | | | | | | | | | | | | |
| | | 209082 | | | | | | | | | | | | |
| | | May 29, 1997 | | | | | | | | | | | | |
| 92 | HPFCR13 | 97977 | Uni-ZAP XR | 102 | 404 | 1 | 404 | 266 | 266 | 340 | 1 | 30 | 31 | 46 |
| | | Apr. 04, 1997 | | | | | | | | | | | | |
| | | 209082 | | | | | | | | | | | | |
| | | May 29, 1997 | | | | | | | | | | | | |
| 92 | HPFCR13 | 97977 | Uni-ZAP XR | 231 | 1035 | 602 | 1035 | 859 | 859 | 469 | 1 | 32 | 33 | 58 |
| | | Apr. 04, 1997 | | | | | | | | | | | | |
| | | 209082 | | | | | | | | | | | | |
| | | May 29, 1997 | | | | | | | | | | | | |
| 93 | HPHAC83 | 97977 | Uni-ZAP XR | 103 | 2218 | 840 | 2182 | 1035 | 1035 | 341 | 1 | 17 | 18 | 17 |
| | | Apr. 04, 1997 | | | | | | | | | | | | |
| | | 209082 | | | | | | | | | | | | |
| | | May 29, 1997 | | | | | | | | | | | | |
| 93 | HOFNZ45 | 209568 | pCMVSport | 232 | 760 | 1 | 728 | 86 | 86 | 470 | 1 | 36 | 37 | 61 |
| | | 01/06/98 | 2.0 | | | | | | | | | | | |
| 94 | HPMBQ32 | 97977 | Uni-ZAP XR | 104 | 1351 | 1 | 1351 | 18 | 18 | 342 | 1 | 23 | 24 | 86 |
| | | Apr. 04, 1997 | | | | | | | | | | | | |
| | | 209082 | | | | | | | | | | | | |
| | | May 29, 1997 | | | | | | | | | | | | |
| 95 | HPWAN23 | 97977 | Uni-ZAP XR | 105 | 2066 | 51 | 2052 | 270 | 270 | 343 | 1 | 29 | 30 | 537 |
| | | Apr. 04, 1997 | | | | | | | | | | | | |
| | | 209082 | | | | | | | | | | | | |
| | | May 29, 1997 | | | | | | | | | | | | |
| 95 | HPWAN23 | 97977 | Uni-ZAP XR | 233 | 2057 | 1 | 1954 | 220 | 220 | 471 | 1 | 29 | 30 | 315 |
| | | Apr. 04, 1997 | | | | | | | | | | | | |
| | | 209082 | | | | | | | | | | | | |
| | | May 29, 1997 | | | | | | | | | | | | |
| 96 | HRDFB85 | 97977 | Uni-ZAP XR | 106 | 1705 | 23 | 1697 | 233 | 233 | 344 | 1 | 21 | 22 | 201 |
| | | Apr. 04, 1997 | | | | | | | | | | | | |
| | | 209082 | | | | | | | | | | | | |
| | | May 29, 1997 | | | | | | | | | | | | |
| 97 | HRGBR28 | 97977 | Uni-ZAP XR | 107 | 1167 | 1 | 557 | 604 | 604 | 345 | 1 | 22 | 23 | 122 |
| | | Apr. 04, 1997 | | | | | | | | | | | | |
| | | 209082 | | | | | | | | | | | | |
| | | May 29, 1997 | | | | | | | | | | | | |
| 98 | HSKGN81 | 97977 | pBluescript | 108 | 1907 | 151 | 1432 | 353 | 353 | 346 | 1 | 23 | 24 | 260 |
| | | Apr. 04, 1997 | | | | | | | | | | | | |
| | | 209082 | | | | | | | | | | | | |
| | | May 29, 1997 | | | | | | | | | | | | |
| 98 | HSKGN81 | 97977 | pBluescript | 234 | 2084 | 335 | 2084 | 537 | 537 | 472 | 1 | 19 | 20 | 23 |
| | | Apr. 04, 1997 | | | | | | | | | | | | |
| | | 209082 | | | | | | | | | | | | |
| | | May 29, 1997 | | | | | | | | | | | | |
| 99 | HSPAH56 | 97977 | pSport1 | 109 | 611 | 1 | 576 | 229 | 229 | 347 | 1 | 25 | 26 | 47 |
| | | Apr. 04, 1997 | | | | | | | | | | | | |
| | | 209082 | | | | | | | | | | | | |
| | | May 29, 1997 | | | | | | | | | | | | |
| 100 | HE8EU04 | 209746 | Uni-ZAP XR | 110 | 2632 | 294 | 2632 | 337 | 337 | 348 | 1 | 25 | 26 | 333 |
| | | 04/07/98 | | | | | | | | | | | | |
| 100 | HSXBT86 | 97977 | Uni-ZAP XR | 235 | 2143 | 53 | 1096 | 235 | 235 | 473 | 1 | | | 9 |
| | | Apr. 04, 1997 | | | | | | | | | | | | |
| | | 209082 | | | | | | | | | | | | |
| | | May 29, 1997 | | | | | | | | | | | | |
| 101 | HSXCS62 | 97977 | Uni-ZAP XR | 111 | 2249 | 1 | 1953 | 90 | 90 | 349 | 1 | 18 | 19 | 199 |
| | | Apr. 04, 1997 | | | | | | | | | | | | |
| | | 209082 | | | | | | | | | | | | |
| | | May 29, 1997 | | | | | | | | | | | | |
| 102 | HTEFU09 | 97977 | Uni-ZAP XR | 112 | 2198 | 228 | 2158 | 400 | 400 | 350 | 1 | | | 23 |
| | | Apr. 04, 1997 | | | | | | | | | | | | |
| | | 209082 | | | | | | | | | | | | |
| | | May 29, 1997 | | | | | | | | | | | | |
| 103 | HTEKM35 | 97977 | Uni-ZAP XR | 113 | 1043 | 40 | 1043 | 320 | 320 | 351 | 1 | 20 | 21 | 142 |
| | | Apr. 04, 1997 | | | | | | | | | | | | |
| | | 209082 | | | | | | | | | | | | |
| | | May 29, 1997 | | | | | | | | | | | | |
| 104 | HTGEP89 | 97977 | Uni-ZAP XR | 114 | 703 | 1 | 703 | 285 | 285 | 352 | 1 | 29 | 30 | 94 |
| | | Apr. 04, 1997 | | | | | | | | | | | | |
| | | 209082 | | | | | | | | | | | | |
| | | May 29, 1997 | | | | | | | | | | | | |
| 105 | HTGEW91 | 97977 | Uni-ZAP XR | 115 | 3684 | 526 | 1338 | 584 | 584 | 353 | 1 | 24 | 25 | 37 |
| | | Apr. 04, 1997 | | | | | | | | | | | | |
| | | 209082 | | | | | | | | | | | | |
| | | May 29, 1997 | | | | | | | | | | | | |
| 106 | HTOEY16 | 97977 | Uni-ZAP XR | 116 | 1965 | 127 | 1915 | 202 | 202 | 354 | 1 | 27 | 28 | 38 |
| | | Apr. 04, 1997 | | | | | | | | | | | | |
| | | 209082 | | | | | | | | | | | | |
| | | May 29, 1997 | | | | | | | | | | | | |
| 107 | HTPCN79 | 97977 | Uni-ZAP XR | 117 | 503 | 1 | 503 | | 1 | 355 | 1 | 7 | 8 | 70 |
| | | Apr. 04, 1997 | | | | | | | | | | | | |
| | | 209082 | | | | | | | | | | | | |
| | | May 29, 1997 | | | | | | | | | | | | |
| 108 | HTSGM54 | 97977 | pBluescript | 118 | 1071 | 50 | 981 | 29 | 29 | 356 | 1 | 30 | 31 | 227 |
| | | Apr. 04, 1997 | | | | | | | | | | | | |
| | | 209082 | | | | | | | | | | | | |
| | | May 29, 1997 | | | | | | | | | | | | |
| 108 | HTSGM54 | 97977 | pBluescript | 236 | 1133 | 316 | 1069 | | 423 | 474 | 1 | 12 | 13 | 84 |
| | | Apr. 04, 1997 | | | | | | | | | | | | |
| | | 209082 | | | | | | | | | | | | |
| | | May 29, 1997 | | | | | | | | | | | | |
| 109 | HTSHE40 | 97977 | pBluescript | 119 | 1101 | 118 | 956 | 218 | 218 | 357 | 1 | 31 | 32 | 89 |
| | | Apr. 04, 1997 | | | | | | | | | | | | |
| | | 209082 | | | | | | | | | | | | |
| | | May 29, 1997 | | | | | | | | | | | | |
| 110 | HTWAF58 | 97977 | Lambda ZAP | 120 | 282 | 1 | 282 | 137 | 137 | 358 | 1 | 25 | 26 | 48 |
| | | Apr. 04, 1997 | II | | | | | | | | | | | |
| | | 209082 | | | | | | | | | | | | |
| | | May 29, 1997 | | | | | | | | | | | | |
| 111 | HTWBY29 | 97977 | pSport1 | 121 | 2635 | 1593 | 2489 | 1654 | 1654 | 359 | 1 | 25 | 26 | 55 |
| | | Apr. 04, 1997 | | | | | | | | | | | | |
| | | 209082 | | | | | | | | | | | | |
| | | May 29, 1997 | | | | | | | | | | | | |
| 112 | HUKFC71 | 209007 | Lambda ZAP | 122 | 994 | 1 | 932 | | 272 | 360 | 1 | 15 | 16 | 221 |
| | | Apr. 28, 1997 | II | | | | | | | | | | | |
| | | 209083 | | | | | | | | | | | | |
| | | May 29, 1997 | | | | | | | | | | | | |
| 113 | HCE3Q10 | 209007 | Uni-ZAP XR | 123 | 1542 | 1 | 1542 | 143 | 143 | 361 | 1 | 25 | 26 | 63 |
| | | Apr. 28, 1997 | | | | | | | | | | | | |
| | | 209083 | | | | | | | | | | | | |
| | | May 29, 1997 | | | | | | | | | | | | |
| 114 | HCEVR60 | 209007 | Uni-ZAP XR | 124 | 1390 | 82 | 1390 | 127 | 127 | 362 | 1 | 32 | 33 | 153 |
| | | Apr. 28, 1997 | | | | | | | | | | | | |
| | | 209083 | | | | | | | | | | | | |
| | | May 29, 1997 | | | | | | | | | | | | |
| 115 | HDTAW95 | 209007 | pCMVSport | 125 | 1288 | 412 | 1288 | 571 | 571 | 363 | 1 | | | 16 |
| | | Apr. 28, 1997 | 2.0 | | | | | | | | | | | |
| | | 209083 | | | | | | | | | | | | |
| | | May 29, 1997 | | | | | | | | | | | | |
| 116 | HE6EL90 | 209007 | Uni-ZAP XR | 126 | 1517 | 1 | 1452 | 243 | 243 | 364 | 1 | | | 9 |
| | | Apr. 28, 1997 | | | | | | | | | | | | |
| | | 209083 | | | | | | | | | | | | |
| | | May 29, 1997 | | | | | | | | | | | | |
| 117 | HELBU29 | 209007 | Uni-ZAP XR | 127 | 1073 | 198 | 1073 | | 776 | 365 | 1 | | | 13 |
| | | Apr. 28, 1997 | | | | | | | | | | | | |
| | | 209083 | | | | | | | | | | | | |
| | | May 29, 1997 | | | | | | | | | | | | |
| 118 | HERAH36 | 209007 | Uni-ZAP XR | 128 | 300 | 155 | 300 | 202 | 202 | 366 | 1 | | | 17 |
| | | Apr. 28, 1997 | | | | | | | | | | | | |
| | | 209083 | | | | | | | | | | | | |
| | | May 29, 1997 | | | | | | | | | | | | |
| 119 | HFXBW82 | 209007 | Lambda ZAP | 129 | 1275 | 1 | 1275 | 56 | 56 | 367 | 1 | 23 | 24 | 61 |
| | | Apr. 28, 1997 | II | | | | | | | | | | | |
| | | 209083 | | | | | | | | | | | | |
| | | May 29, 1997 | | | | | | | | | | | | |
| 120 | HHPTD20 | 209007 | Uni-ZAP XR | 130 | 472 | 51 | 472 | | 243 | 368 | 1 | | | 32 |
| | | Apr. 28, 1997 | | | | | | | | | | | | |
| | | 209083 | | | | | | | | | | | | |
| | | May 29, 1997 | | | | | | | | | | | | |
| 121 | HIBED17 | 209007 | Other | 131 | 1950 | 284 | 1927 | 395 | 395 | 369 | 1 | 72 | 73 | 245 |
| | | Apr. 28, 1997 | | | | | | | | | | | | |
| | | 209083 | | | | | | | | | | | | |
| | | May 29, 1997 | | | | | | | | | | | | |
| 122 | HLTER03 | 209007 | Uni-ZAP XR | 132 | 990 | 1 | 990 | 78 | 78 | 370 | 1 | 22 | 23 | 34 |
| | | Apr. 28, 1997 | | | | | | | | | | | | |
| | | 209083 | | | | | | | | | | | | |
| | | May 29, 1997 | | | | | | | | | | | | |
| 123 | HOABL56 | 209007 | Uni-ZAP XR | 133 | 1720 | 565 | 1720 | 660 | 660 | 371 | 1 | 18 | 19 | 21 |
| | | Apr. 28, 1997 | | | | | | | | | | | | |
| | | 209083 | | | | | | | | | | | | |
| | | May 29, 1997 | | | | | | | | | | | | |
| 124 | HPMCJ92 | 209007 | Uni-ZAP XR | 134 | 705 | 28 | 705 | 106 | 106 | 372 | 1 | 28 | 29 | 98 |
| | | Apr. 28, 1997 | | | | | | | | | | | | |
| | | 209083 | | | | | | | | | | | | |
| | | May 29, 1997 | | | | | | | | | | | | |
| 125 | HPWAZ95 | 209007 | Uni-ZAP XR | 135 | 323 | 1 | 323 | 88 | 88 | 373 | 1 | 27 | 28 | 78 |
| | | Apr. 28, 1997 | | | | | | | | | | | | |
| | | 209083 | | | | | | | | | | | | |
| | | May 29, 1997 | | | | | | | | | | | | |
| 126 | HRGBR18 | 209007 | Uni-ZAP XR | 136 | 582 | 1 | 582 | | 16 | 374 | 1 | 17 | 18 | 30 |
| | | Apr. 28, 1997 | | | | | | | | | | | | |
| | | 209083 | | | | | | | | | | | | |
| | | May 29, 1997 | | | | | | | | | | | | |
| 127 | HSUBW09 | 209007 | Uni-ZAP XR | 137 | 1021 | 1 | 1021 | 153 | 153 | 375 | 1 | 32 | 33 | 56 |
| | | Apr. 28, 1997 | | | | | | | | | | | | |
| | | 209083 | | | | | | | | | | | | |
| | | May 29, 1997 | | | | | | | | | | | | |
| 128 | HUKCO64 | 209007 | Lambda ZAP | 138 | 1777 | 1 | 1339 | 198 | 198 | 376 | 1 | 23 | 24 | 63 |
| | | Apr. 28, 1997 | II | | | | | | | | | | | |
| | | 209083 | | | | | | | | | | | | |
| | | May 29, 1997 | | | | | | | | | | | | |
| 129 | H6EAA53 | 209007 | Uni-ZAP XR | 139 | 643 | 303 | 643 | 306 | 306 | 377 | 1 | 14 | 15 | 38 |
| | | Apr. 28, 1997 | | | | | | | | | | | | |
| | | 209083 | | | | | | | | | | | | |
| | | May 29, 1997 | | | | | | | | | | | | |
| 130 | HAGAI11 | 209007 | Uni-ZAP XR | 140 | 1220 | 1 | 1220 | 567 | 567 | 378 | 1 | 50 | 51 | 98 |
| | | Apr. 28, 1997 | | | | | | | | | | | | |
| | | 209083 | | | | | | | | | | | | |
| | | May 29, 1997 | | | | | | | | | | | | |
| 131 | HAGA039 | 209007 | Uni-ZAP XR | 141 | 721 | 1 | 721 | | 415 | 379 | 1 | | | 14 |
| | | Apr. 28, 1997 | | | | | | | | | | | | |
| | | 209083 | | | | | | | | | | | | |
| | | May 29, 1997 | | | | | | | | | | | | |
| 132 | HALSK07 | 209007 | Uni-ZAP XR | 142 | 1468 | 125 | 1468 | 210 | 210 | 380 | 1 | 29 | 30 | 33 |
| | | Apr. 28, 1997 | | | | | | | | | | | | |
| | | 209083 | | | | | | | | | | | | |
| | | May 29, 1997 | | | | | | | | | | | | |
| 133 | HALSQ59 | 209007 | Uni-ZAP XR | 143 | 300 | 4 | 300 | 101 | 101 | 381 | 1 | 22 | 23 | 66 |
| | | Apr. 28, 1997 | | | | | | | | | | | | |
| | | 209083 | | | | | | | | | | | | |
| | | May 29, 1997 | | | | | | | | | | | | |
| 134 | HAIBP89 | 209877 | Uni-ZAP XR | 144 | 2243 | 173 | 2243 | 311 | 311 | 382 | 1 | 27 | 28 | 317 |
| | | 05/18/98 | | | | | | | | | | | | |
| 134 | HBGCB91 | 209007 | Uni-ZAP XR | 237 | 1025 | 409 | 1025 | 624 | 624 | 475 | 1 | 20 | 21 | 25 |
| | | Apr. 28, 1997 | | | | | | | | | | | | |
| | | 209083 | | | | | | | | | | | | |
| | | May 29, 1997 | | | | | | | | | | | | |
| 135 | HBMTD81 | 209008 | Uni-ZAP XR | 145 | 1082 | 163 | 1082 | 357 | 357 | 383 | 1 | | | 30 |
| | | Apr. 28, 1997 | | | | | | | | | | | | |
| | | 209084 | | | | | | | | | | | | |
| | | May 29, 1997 | | | | | | | | | | | | |
| 136 | HBXGK12 | 209008 | ZAP Express | 146 | 4313 | 1153 | 4313 | 1313 | 1313 | 384 | 1 | 18 | 19 | 42 |
| | | Apr. 28, 1997 | | | | | | | | | | | | |
| | | 209084 | | | | | | | | | | | | |
| | | May 29, 1997 | | | | | | | | | | | | |
| 137 | HFKFJ07 | 209010 | Uni-ZAP XR | 147 | 1183 | 1 | 1183 | 149 | 149 | 385 | 1 | 41 | 42 | 254 |
| | | Apr. 28, 1997 | | | | | | | | | | | | |
| | | 209085 | | | | | | | | | | | | |
| | | May 29, 1997 | | | | | | | | | | | | |
| 138 | HCQAI40 | 209008 | Lambda ZAP | 148 | 734 | 1 | 734 | 285 | 285 | 386 | 1 | | | 19 |
| | | Apr. 28, 1997 | II | | | | | | | | | | | |
| | | 209084 | | | | | | | | | | | | |
| | | May 29, 1997 | | | | | | | | | | | | |
| 139 | HCWHZ24 | 209008 | ZAP Express | 149 | 1405 | 1 | 1405 | 108 | 108 | 387 | 1 | 34 | 35 | 63 |
| | | Apr. 28, 1997 | | | | | | | | | | | | |
| | | 209084 | | | | | | | | | | | | |
| | | May 29, 1997 | | | | | | | | | | | | |
| 140 | HE2GT20 | 209008 | Uni-ZAP XR | 150 | 2890 | 1178 | 2890 | 1178 | 1178 | 388 | 1 | 31 | 32 | 39 |
| | | Apr. 28, 1997 | | | | | | | | | | | | |
| | | 209084 | | | | | | | | | | | | |
| | | May 29, 1997 | | | | | | | | | | | | |
| 141 | HE8EY43 | 209008 | Uni-ZAP XR | 151 | 2399 | 1181 | 2399 | 1265 | 1265 | 389 | 1 | 30 | 31 | 34 |
| | | Apr. 28, 1997 | | | | | | | | | | | | |
| | | 209084 | | | | | | | | | | | | |
| | | May 29, 1997 | | | | | | | | | | | | |
| 142 | HFCEB37 | 209008 | Uni-ZAP XR | 152 | 802 | 352 | 802 | | 487 | 390 | 1 | | | 10 |
| | | Apr. 28, 1997 | | | | | | | | | | | | |
| | | 209084 | | | | | | | | | | | | |
| | | May 29, 1997 | | | | | | | | | | | | |
| 143 | HFTCT67 | 209008 | Uni-ZAP XR | 153 | 461 | 24 | 461 | 145 | 145 | 391 | 1 | 37 | 38 | 63 |
| | | Apr. 28, 1997 | | | | | | | | | | | | |
| | | 209084 | | | | | | | | | | | | |
| | | May 29, 1997 | | | | | | | | | | | | |
| 144 | HGLAM46 | 209008 | Uni-ZAP XR | 154 | 2388 | 818 | 2388 | 648 | 648 | 392 | 1 | | | 18 |
| | | Apr. 28, 1997 | | | | | | | | | | | | |
| | | 209084 | | | | | | | | | | | | |
| | | May 29, 1997 | | | | | | | | | | | | |
| 145 | HHGBR15 | 209008 | Lambda ZAP | 155 | 642 | 322 | 642 | 369 | 369 | 393 | 1 | 41 | 42 | 43 |
| | | Apr. 28, 1997 | II | | | | | | | | | | | |
| | | 209084 | | | | | | | | | | | | |
| | | May 29, 1997 | | | | | | | | | | | | |
| 146 | HJAAU36 | 209008 | pBluescript | 156 | 1251 | 583 | 1251 | | 933 | 394 | 1 | 16 | 17 | 16 |
| | | Apr. 28, 1997 | SK- | | | | | | | | | | | |
| | | 209084 | | | | | | | | | | | | |
| | | May 29, 1997 | | | | | | | | | | | | |
| 147 | HUSIT49 | 209008 | pSport1 | 157 | 2127 | 247 | 2127 | 383 | 383 | 395 | 1 | 47 | 48 | 83 |
| | | Apr. 28, 1997 | | | | | | | | | | | | |
| | | 209084 | | | | | | | | | | | | |
| | | May 29, 1997 | | | | | | | | | | | | |
| 148 | HKLAB16 | 209008 | Lambda ZAP | 158 | 1625 | 817 | 1625 | 1012 | 1012 | 396 | 1 | 18 | 19 | 20 |
| | | Apr. 28, 1997 | II | | | | | | | | | | | |
| | | 209084 | | | | | | | | | | | | |
| | | May 29, 1997 | | | | | | | | | | | | |
| 149 | HLMMU76 | 209008 | Lambda ZAP | 159 | 1687 | 1307 | 1687 | 1296 | 1296 | 397 | 1 | 28 | 29 | 28 |
| | | Apr. 28, 1997 | II | | | | | | | | | | | |
| | | 209084 | | | | | | | | | | | | |
| | | May 29, 1997 | | | | | | | | | | | | |
| 150 | HMSKQ35 | 209008 | Uni-ZAP XR | 160 | 1842 | 172 | 1463 | 319 | 319 | 398 | 1 | 30 | 31 | 33 |
| | | Apr. 28, 1997 | | | | | | | | | | | | |
| | | 209084 | | | | | | | | | | | | |
| | | May 29, 1997 | | | | | | | | | | | | |
| 151 | HNHED86 | 209008 | Uni-ZAP XR | 161 | 770 | 1 | 770 | 30 | 30 | 399 | 1 | 31 | 32 | 46 |
| | | Apr. 28, 1997 | | | | | | | | | | | | |
| | | 209084 | | | | | | | | | | | | |
| | | May 29, 1997 | | | | | | | | | | | | |
| 152 | HNHEJ88 | 209008 | Uni-ZAP XR | 162 | 519 | 1 | 519 | 242 | 242 | 400 | 1 | 17 | 18 | 24 |
| | | Apr. 28, 1997 | | | | | | | | | | | | |
| | | 209084 | | | | | | | | | | | | |
| | | May 29, 1997 | | | | | | | | | | | | |
| 153 | HNHFQ63 | 209008 | Uni-ZAP XR | 163 | 753 | 1 | 753 | 164 | 164 | 401 | 1 | 17 | 18 | 67 |
| | | Apr. 28, 1997 | | | | | | | | | | | | |
| | | 209084 | | | | | | | | | | | | |
| | | May 29, 1997 | | | | | | | | | | | | |
| 154 | HOECU83 | 209009 | Uni-ZAP XR | 164 | 1893 | 1 | 1211 | 1637 | 1637 | 402 | 1 | 28 | 29 | 85 |
| | | Apr. 28, 1997 | | | | | | | | | | | | |
| 154 | HOECU83 | 209009 | Uni-ZAP XR | 238 | 1400 | 189 | 1400 | | 508 | 476 | 1 | 22 | 23 | 33 |
| | | Apr. 28, 1997 | | | | | | | | | | | | |
| 155 | HPTRC15 | 209009 | pBluescript | 165 | 2153 | 594 | 2153 | 57 | 57 | 403 | 1 | 26 | 27 | 82 |
| | | Apr. 28, 1997 | | | | | | | | | | | | |
| 156 | HSKCP69 | 209009 | Uni-ZAP XR | 166 | 1251 | 219 | 1120 | 49 | 49 | 404 | 1 | 27 | 28 | 286 |
| | | Apr. 28, 1997 | | | | | | | | | | | | |
| 156 | HSKCP69 | 209009 | Uni-ZAP XR | 239 | 1250 | 223 | 1250 | 393 | 393 | 477 | 1 | 32 | 33 | 171 |
| | | Apr. 28, 1997 | | | | | | | | | | | | |
| 157 | H6EAE26 | 209009 | Uni-ZAP XR | 167 | 882 | 48 | 882 | 155 | 155 | 405 | 1 | 33 | 34 | 153 |
| | | Apr. 28, 1997 | | | | | | | | | | | | |
| 158 | HAGBX03 | 209009 | Uni-ZAP XR | 168 | 1208 | 1 | 1208 | 290 | 290 | 406 | 1 | 20 | 21 | 37 |
| | | Apr. 28, 1997 | | | | | | | | | | | | |
| 159 | HAGDQ47 | 209009 | Uni-ZAP XR | 169 | 1258 | 1 | 1258 | 44 | 44 | 407 | 1 | 22 | 23 | 60 |
| | | Apr. 28, 1997 | | | | | | | | | | | | |
| 159 | HAGDQ47 | 209009 | Uni-ZAP XR | 240 | 1307 | 1 | 1307 | 44 | 44 | 478 | 1 | 22 | 23 | 60 |
| | | Apr. 28, 1997 | | | | | | | | | | | | |
| 160 | HAICP19 | 209009 | Uni-ZAP XR | 170 | 1624 | 89 | 1483 | 128 | 128 | 408 | 1 | 18 | 19 | 446 |
| | | Apr. 28, 1997 | | | | | | | | | | | | |
| 161 | HAUAE83 | 209009 | Uni-ZAP XR | 171 | 2003 | 889 | 2003 | 957 | 957 | 409 | 1 | 29 | 30 | 64 |
| | | Apr. 28, 1997 | | | | | | | | | | | | |
| 162 | HBHAD12 | 209009 | Uni-ZAP XR | 172 | 786 | 1 | 786 | | 176 | 410 | 1 | 17 | 18 | 23 |
| | | Apr. 28, 1997 | | | | | | | | | | | | |
| 163 | HBMTY28 | 209009 | Uni-ZAP XR | 173 | 1758 | 962 | 1758 | 1184 | 1184 | 411 | 1 | 27 | 28 | 34 |
| | | Apr. 28, 1997 | | | | | | | | | | | | |
| 164 | HBMVP04 | 209009 | Uni-ZAP XR | 174 | 1369 | 29 | 557 | 947 | 947 | 412 | 1 | 33 | 34 | 41 |
| | | Apr. 28, 1997 | | | | | | | | | | | | |
| 164 | HBMVP04 | 209009 | Uni-ZAP XR | 241 | 888 | 330 | 862 | | 546 | 479 | 1 | | | 2 |
| | | Apr. 28, 1997 | | | | | | | | | | | | |
| 165 | HCDDB78 | 209009 | Uni-ZAP XR | 175 | 2379 | 750 | 2379 | 901 | 901 | 413 | 1 | 18 | 19 | 24 |
| | | Apr. 28, 1997 | | | | | | | | | | | | |
| 166 | HCEQA68 | 209010 | Uni-ZAP XR | 176 | 1348 | 1 | 1348 | 12 | 12 | 414 | 1 | 28 | 29 | 78 |
| | | Apr. 28, 1997 | | | | | | | | | | | | |
| | | 209085 | | | | | | | | | | | | |
| | | May 29, 1997 | | | | | | | | | | | | |
| 167 | HCEZS40 | 209010 | Uni-ZAP XR | 177 | 1502 | 178 | 1502 | 388 | 388 | 415 | 1 | 31 | 32 | 51 |
| | | Apr. 28, 1997 | | | | | | | | | | | | |
| | | 209085 | | | | | | | | | | | | |
| | | May 29, 1997 | | | | | | | | | | | | |
| 168 | HCFNF11 | 209010 | pSport1 | 178 | 1637 | 26 | 1607 | 152 | 152 | 416 | 1 | 44 | 45 | 257 |
| | | Apr. 28, 1997 | | | | | | | | | | | | |
| | | 209085 | | | | | | | | | | | | |
| | | May 29, 1997 | | | | | | | | | | | | |
| 169 | HCRBL20 | 209010 | Uni-ZAP XR | 179 | 2911 | 1103 | 2858 | 192 | 192 | 417 | 1 | 32 | 33 | 424 |
| | | Apr. 28, 1997 | | | | | | | | | | | | |
| | | 209085 | | | | | | | | | | | | |
| | | May 29, 1997 | | | | | | | | | | | | |
| 169 | HCRBL20 | 209010 | Uni-ZAP XR | 242 | 1811 | 20 | 1811 | 93 | 93 | 480 | 1 | 36 | 37 | 95 |
| | | Apr. 28, 1997 | | | | | | | | | | | | |
| | | 209085 | | | | | | | | | | | | |
| | | May 29, 1997 | | | | | | | | | | | | |
| 170 | HCUBL62 | 209010 | ZAP Express | 180 | 519 | 1 | 519 | 57 | 57 | 418 | 1 | 28 | 29 | 32 |
| | | Apr. 28, 1997 | | | | | | | | | | | | |
| | | 209085 | | | | | | | | | | | | |
| | | May 29, 1997 | | | | | | | | | | | | |
| 171 | HDSAP81 | 209010 | Uni-ZAP XR | 181 | 968 | 320 | 968 | 476 | 476 | 419 | 1 | 27 | 28 | 79 |
| | | Apr. 28, 1997 | | | | | | | | | | | | |
| | | 209085 | | | | | | | | | | | | |
| | | May 29, 1997 | | | | | | | | | | | | |
| 172 | HE2CT29 | 209010 | Uni-ZAP XR | 182 | 1128 | 1 | 1128 | 111 | 111 | 420 | 1 | 26 | 27 | 94 |
| | | Apr. 28, 1997 | | | | | | | | | | | | |
| | | 209085 | | | | | | | | | | | | |
| | | May 29, 1997 | | | | | | | | | | | | |
| 173 | HE8MG65 | 209010 | Uni-ZAP XR | 183 | 2276 | 48 | 2276 | 88 | 88 | 421 | 1 | 37 | 38 | 257 |
| | | Apr. 28, 1997 | | | | | | | | | | | | |
| | | 209085 | | | | | | | | | | | | |
| | | May 29, 1997 | | | | | | | | | | | | |
| 173 | HE8MG65 | 209010 | Uni-ZAP XR | 243 | 2271 | 56 | 2232 | 79 | 79 | 481 | 1 | 43 | 44 | 170 |
| | | Apr. 28, 1997 | | | | | | | | | | | | |
| | | 209085 | | | | | | | | | | | | |
| | | May 29, 1997 | | | | | | | | | | | | |
| 174 | HE9FB42 | 209010 | Uni-ZAP XR | 184 | 3374 | 86 | 1705 | 277 | 277 | 422 | 1 | 40 | 41 | 704 |
| | | Apr. 28, 1997 | | | | | | | | | | | | |
| | | 209085 | | | | | | | | | | | | |
| | | May 29, 1997 | | | | | | | | | | | | |
| 174 | HE9FB42 | 209010 | Uni-ZAP XR | 244 | 2500 | 76 | 1693 | 518 | 518 | 482 | 1 | 1 | 2 | 623 |
| | | Apr. 28, 1997 | | | | | | | | | | | | |
| | | 209085 | | | | | | | | | | | | |
| | | May 29, 1997 | | | | | | | | | | | | |
| 175 | HEMAM41 | 209010 | Uni-ZAP XR | 185 | 1337 | 60 | 1328 | 175 | 175 | 423 | 1 | 39 | 40 | 190 |
| | | Apr. 28, 1997 | | | | | | | | | | | | |
| | | 209085 | | | | | | | | | | | | |
| | | May 29, 1997 | | | | | | | | | | | | |
| 175 | HEMAM41 | 209010 | Uni-ZAP XR | 245 | 1338 | 33 | 1327 | 175 | 175 | 483 | 1 | 32 | 33 | 91 |
| | | Apr. 28, 1997 | | | | | | | | | | | | |
| | | 209085 | | | | | | | | | | | | |
| | | May 29, 1997 | | | | | | | | | | | | |
| 176 | HEMCV19 | 209010 | Uni-ZAP XR | 186 | 941 | 33 | 931 | 79 | 79 | 424 | 1 | 23 | 24 | 178 |
| | | Apr. 28, 1997 | | | | | | | | | | | | |
| | | 209085 | | | | | | | | | | | | |
| | | May 29, 1997 | | | | | | | | | | | | |
| 177 | HEMDX17 | 209010 | Uni-ZAP XR | 187 | 678 | 1 | 678 | 131 | 131 | 425 | 1 | 21 | 22 | 40 |
| | | Apr. 28, 1997 | | | | | | | | | | | | |
| | | 209085 | | | | | | | | | | | | |
| | | May 29, 1997 | | | | | | | | | | | | |
| 177 | HEMDX17 | 209010 | Uni-ZAP XR | 246 | 654 | 1 | 654 | 137 | 137 | 484 | 1 | | | 12 |
| | | Apr. 28, 1997 | | | | | | | | | | | | |
| | | 2209085 | | | | | | | | | | | | |
| | | May 29, 1997 | | | | | | | | | | | | |
| 178 | HETAR54 | 209010 | Uni-ZAP XR | 188 | 1848 | 454 | 1848 | 948 | 948 | 426 | 1 | 14 | 15 | 232 |
| | | Apr. 28, 1997 | | | | | | | | | | | | |
| | | 209085 | | | | | | | | | | | | |
| | | May 29, 1997 | | | | | | | | | | | | |
| 179 | HETBX14 | 209010 | Uni-ZAP XR | 189 | 1292 | 303 | 1292 | 207 | 207 | 427 | 1 | 18 | 19 | 250 |
| | | Apr. 28, 1997 | | | | | | | | | | | | |
| | | 209085 | | | | | | | | | | | | |
| | | May 29, 1997 | | | | | | | | | | | | |
| 179 | HETBX14 | 209010 | Uni-ZAP XR | 247 | 1146 | 157 | 1146 | | 74 | 485 | 1 | 14 | 15 | 53 |
| | | Apr. 28, 1997 | | | | | | | | | | | | |
| | | 209085 | | | | | | | | | | | | |
| | | May 29, 1997 | | | | | | | | | | | | |
| 180 | HFGAB48 | 209010 | Uni-ZAP XR | 190 | 906 | 156 | 906 | 628 | 628 | 428 | 1 | 23 | 24 | 58 |
| | | Apr. 28, 1997 | | | | | | | | | | | | |
| | | 209085 | | | | | | | | | | | | |
| | | May 29, 1997 | | | | | | | | | | | | |
| 181 | HFKFI40 | 209010 | Uni-ZAP XR | 191 | 1941 | 120 | 1002 | 213 | 213 | 429 | 1 | 18 | 19 | 218 |
| | | Apr. 28, 1997 | | | | | | | | | | | | |
| | | 209085 | | | | | | | | | | | | |
| | | May 29, 1997 | | | | | | | | | | | | |
| 182 | HFXHN68 | 209010 | Lambda ZAP | 192 | 2118 | 777 | 2118 | 966 | 966 | 430 | 1 | 23 | 24 | 50 |
| | | Apr. 28, 1997 | II | | | | | | | | | | | |
| | | 209085 | | | | | | | | | | | | |
| | | May 29, 1997 | | | | | | | | | | | | |
| 183 | HGBFO79 | 209011 | Uni-ZAP XR | 193 | 1538 | 259 | 1538 | 273 | 273 | 431 | 1 | 23 | 24 | 49 |
| | | Apr. 28, 1997 | | | | | | | | | | | | |
| 184 | HGLAM56 | 209011 | Uni-ZAP XR | 194 | 1098 | 68 | 1098 | | 185 | 432 | 1 | 28 | 29 | 69 |
| | | Apr. 28, 1997 | | | | | | | | | | | | |
| 185 | HHLBA89 | 209011 | pBluescript | 195 | 1001 | 1 | 1001 | 324 | 324 | 433 | 1 | 25 | 26 | 39 |
| | | Apr. 28, 1997 | SK- | | | | | | | | | | | |
| 186 | HHPDW05 | 209011 | Uni-ZAP XR | 196 | 1458 | 1 | 1458 | 254 | 254 | 434 | 1 | 17 | 18 | 104 |
| | | Apr. 28, 1997 | | | | | | | | | | | | |
| 186 | HHPDW05 | 209011 | Uni-ZAP XR | 248 | 1443 | 1 | 1443 | 246 | 246 | 486 | 1 | 21 | 22 | 21 |
| | | Apr. 28, 1997 | | | | | | | | | | | | |
| 187 | HHPSD37 | 209011 | pBluescript | 197 | 1282 | 66 | 1282 | 171 | 171 | 435 | 1 | 19 | 20 | 37 |
| | | Apr. 28, 1997 | | | | | | | | | | | | |
| 188 | HHPSF70 | 209011 | pBluescript | 198 | 951 | 26 | 951 | | 162 | 436 | 1 | 16 | 17 | 34 |
| | | Apr. 28, 1997 | | | | | | | | | | | | |
| 189 | HHSAK25 | 209011 | Uni-ZAP XR | 199 | 1740 | 1390 | 1740 | 1534 | 1534 | 437 | 1 | 19 | 20 | 31 |
| | | Apr. 28, 1997 | | | | | | | | | | | | |
| 190 | HIASB53 | 209011 | pBluescript | 200 | 1707 | 401 | 1195 | 652 | 652 | 438 | 1 | 26 | 27 | 126 |
| | | Apr. 28, 1997 | | | | | | | | | | | | |
| 191 | HJABZ65 | 209011 | pBluescript | 201 | 779 | 1 | 779 | 23 | 23 | 439 | 1 | 26 | 27 | 68 |
| | | Apr. 28, 1997 | SK- | | | | | | | | | | | |
| 192 | HJPBB39 | 209011 | Uni-ZAP XR | 202 | 1617 | 188 | 1605 | 182 | 182 | 440 | 1 | 28 | 29 | 91 |
| | | Apr. 28, 1997 | | | | | | | | | | | | |
| 193 | HLHSK94 | 209011 | pBluescript | 203 | 1974 | 1 | 1794 | 112 | 112 | 441 | 1 | 26 | 27 | 379 |
| | | Apr. 28, 1997 | | | | | | | | | | | | |
| 194 | HLHTC70 | 209011 | pBluescript | 204 | 1057 | 229 | 1057 | 365 | 365 | 442 | 1 | 23 | 24 | 22 |
| | | Apr. 28, 1997 | | | | | | | | | | | | |
| 195 | HLMIW92 | 209011 | Lambda ZAP | 205 | 721 | 1 | 721 | 244 | 244 | 443 | 1 | 25 | 26 | 46 |
| | | Apr. 28, 1997 | II | | | | | | | | | | | |
| 196 | HLTCY93 | 209011 | Uni-ZAP XR | 206 | 2465 | 988 | 2465 | 387 | 387 | 444 | 1 | 27 | 28 | 214 |
| | | Apr. 28, 1997 | | | | | | | | | | | | |
| 197 | HLTDB65 | 209011 | Uni-ZAP XR | 207 | 1480 | 1 | 1480 | | 371 | 445 | 1 | 15 | 16 | 143 |
| | | Apr. 28, 1997 | | | | | | | | | | | | |
| 198 | HMSHM43 | 209011 | Uni-ZAP XR | 208 | 872 | 1 | 872 | 35 | 35 | 446 | 1 | 18 | 19 | 36 |
| | | Apr. 28, 1997 | | | | | | | | | | | | |
| 199 | HMSHQ24 | 209011 | Uni-ZAP XR | 209 | 1779 | 16 | 1779 | 148 | 148 | 447 | 1 | 24 | 25 | 36 |
| | | Apr. 28, 1997 | | | | | | | | | | | | |
| 200 | HNFAH08 | 209011 | Uni-ZAP XR | 210 | 2110 | 592 | 2110 | 611 | 611 | 448 | 1 | 18 | 19 | 191 |
| | | Apr. 28, 1997 | | | | | | | | | | | | |
| 201 | HNGAO10 | 209011 | Uni-ZAP XR | 211 | 938 | 1 | 938 | 107 | 107 | 449 | 1 | 27 | 28 | 30 |
| | | Apr. 28, 1997 | | | | | | | | | | | | |
| 202 | HNGBE45 | 209011 | Uni-ZAP XR | 212 | 1551 | 1 | 1551 | 114 | 114 | 450 | 1 | 21 | 22 | 100 |
| | | Apr. 28, 1997 | | | | | | | | | | | | |
| 203 | HNHAZ16 | 209011 | Uni-ZAP XR | 213 | 997 | 1 | 997 | 202 | 202 | 451 | 1 | 24 | 25 | 36 |
| | | Apr. 28, 1997 | | | | | | | | | | | | |
| 204 | HNHCM59 | 209011 | Uni-ZAP XR | 214 | 1496 | 1 | 1132 | | 165 | 452 | 1 | 28 | 29 | 41 |
| | | Apr. 28, 1997 | | | | | | | | | | | | |
| 205 | HOSFM22 | 97977 | Uni-ZAP XR | 215 | 1308 | 501 | 1308 | 1081 | 1081 | 453 | 1 | 46 | 47 | 48 |
| | | Apr. 04, 1997 | | | | | | | | | | | | |
| | | 209082 | | | | | | | | | | | | |
| | | May 29, 1997 | | | | | | | | | | | | |
| 206 | HPHAC88 | 97977 | Uni-ZAP XR | 216 | 1705 | 384 | 1705 | 549 | 549 | 454 | 1 | 23 | 24 | 24 |
| | | Apr. 04, 1997 | | | | | | | | | | | | |
| | | 209082 | | | | | | | | | | | | |
| | | May 29, 1997 | | | | | | | | | | | | |
| 207 | HCDEO95 | 209007 | Uni-ZAP XR | 217 | 999 | 608 | 999 | 273 | 273 | 455 | 1 | 22 | 23 | 54 |
| | | Apr. 28, 1997 | | | | | | | | | | | | |
| | | 209083 | | | | | | | | | | | | |
| | | May 29, 1997 | | | | | | | | | | | | |

[1547] Table 1 summarizes the information corresponding to each “Gene No.” described above. The nucleotide sequence identified as “NT SEQ ID NO:X” was assembled from partially homologous (“overlapping”) sequences obtained from the “cDNA clone ID” identified in Table 1 and, in some cases, from additional related DNA clones. The overlapping sequences were assembled into a single contiguous sequence of high redundancy (usually three to five overlapping sequences at each nucleotide position), resulting in a final sequence identified as SEQ ID NO:X.

[1548] The cDNA Clone ID was deposited on the date and given the corresponding deposit number listed in “ATCC Deposit No:Z and Date.” Some of the deposits contain multiple different clones corresponding to the same gene. “Vector” refers to the type of vector contained in the cDNA Clone ID.

[1549] “Total NT Seq.” refers to the total number of nucleotides in the contig identified by “Gene No.” The deposited clone may contain all or most of these sequences, reflected by the nucleotide position indicated as “5′ NT of Clone Seq.” and the “3′ NT of Clone Seq.” of SEQ ID NO:X. The nucleotide position of SEQ ID NO:X of the putative start codon (methionine) is identified as “5′ NT of Start Codon.” Similarly, the nucleotide position of SEQ ID NO:X of the predicted signal sequence is identified as “5′ NT of First AA of Signal Pep.”

[1550] The translated amino acid sequence, beginning with the methionine, is identified as “AA SEQ ID NO:Y,” although other reading frames can also be easily translated using known molecular biology techniques. The polypeptides produced by these alternative open reading frames are specifically contemplated by the present invention.

[1551] The first and last amino acid position of SEQ ID NO:Y of the predicted signal peptide is identified as “First AA of Sig Pep” and “Last AA of Sig Pep.” The predicted first amino acid position of SEQ ID NO:Y of the secreted portion is identified as “Predicted First AA of Secreted Portion.” Finally, the amino acid position of SEQ ID NO:Y of the last amino acid in the open reading frame is identified as “Last AA of ORF.”

[1552] SEQ ID NO:X (where X may be any of the polynucleotide sequences disclosed in the sequence listing) and the translated SEQ ID NO:Y (where Y may be any of the polypeptide sequences disclosed in the sequence listing) are sufficiently accurate and otherwise suitable for a variety of uses well known in the art and described further below. For instance, SEQ ID NO:X is useful for designing nucleic acid hybridization probes that will detect nucleic acid sequences contained in SEQ ID NO:X or the cDNA contained in the deposited clone. These probes will also hybridize to nucleic acid molecules in biological samples, thereby enabling a variety of forensic and diagnostic methods of the invention. Similarly, polypeptides identified from SEQ ID NO:Y may be used, for example, to generate antibodies which bind specifically to proteins containing the polypeptides and the secreted proteins encoded by the cDNA clones identified in Table 1.

[1553] Nevertheless, DNA sequences generated by sequencing reactions can contain sequencing errors. The errors exist as misidentified nucleotides, or as insertions or deletions of nucleotides in the generated DNA sequence. The erroneously inserted or deleted nucleotides cause frame shifts in the reading frames of the predicted amino acid sequence. In these cases, the predicted amino acid sequence diverges from the actual amino acid sequence, even though the generated DNA sequence may be greater than 99.9% identical to the actual DNA sequence (for example, one base insertion or deletion in an open reading frame of over 1000 bases).

[1554] Accordingly, for those applications requiring precision in the nucleotide sequence or the amino acid sequence, the present invention provides not only the generated nucleotide sequence identified as SEQ ID NO:X and the predicted translated amino acid sequence identified as SEQ ID NO:Y, but also a sample of plasmid DNA containing a human cDNA of the invention deposited with the ATCC, as set forth in Table 1. The nucleotide sequence of each deposited clone can readily be determined by sequencing the deposited clone in accordance with known methods. The predicted amino acid sequence can then be verified from such deposits. Moreover, the amino acid sequence of the protein encoded by a particular clone can also be directly determined by peptide sequencing or by expressing the protein in a suitable host cell containing the deposited human cDNA, collecting the protein, and determining its sequence.

[1555] The present invention also relates to the genes corresponding to SEQ ID NO:X, SEQ ID NO:Y, or the deposited clone. The corresponding gene can be isolated in accordance with known methods using the sequence information disclosed herein. Such methods include preparing probes or primers from the disclosed sequence and identifying or amplifying the corresponding gene from appropriate sources of genomic material.

[1556] Also provided in the present invention are allelic variants, orthologs, and/or species homologs. Procedures known in the art can be used to obtain full-length genes, allelic variants, splice variants, full-length coding portions, orthologs, and/or species homologs of genes corresponding to SEQ ID NO:X, SEQ ID NO:Y, or a deposited clone, using information from the sequences disclosed herein or the clones deposited with the ATCC. For example, allelic variants and/or species homologs may be isolated and identified by making suitable probes or primers from the sequences provided herein and screening a suitable nucleic acid source for allelic variants and/or the desired homologue.

[1557] The polypeptides of the invention can be prepared in any suitable manner. Such polypeptides include isolated naturally occurring polypeptides, recombinantly produced polypeptides, synthetically produced polypeptides, or polypeptides produced by a combination of these methods. Means for preparing such polypeptides are well understood in the art.

[1558] The polypeptides may be in the form of the secreted protein, including the mature form, or may be a part of a larger protein, such as a fusion protein (see below). It is often advantageous to include an additional amino acid sequence which contains secretory or leader sequences, pro-sequences, sequences which aid in purification, such as multiple histidine residues, or an additional sequence for stability during recombinant production.

[1559] The polypeptides of the present invention are preferably provided in an isolated form, and preferably are substantially purified. A recombinantly produced version of a polypeptide, including the secreted polypeptide, can be substantially purified using techniques described herein or otherwise known in the art, such as, for example, by the one-step method described in Smith and Johnson, Gene 67:31-40 (1988). Polypeptides of the invention also can be purified from natural, synthetic or recombinant sources using techniques described herein or otherwise known in the art, such as, for example, antibodies of the invention raised against the secreted protein.

[1560] The present invention provides a polynucleotide comprising, or alternatively consisting of, the nucleic acid sequence of SEQ ID NO:X, and/or a cDNA contained in ATCC deposit Z. The present invention also provides a polypeptide comprising, or alternatively, consisting of, the polypeptide sequence of SEQ ID NO:Y and/or a polypeptide encoded by the cDNA contained in ATCC deposit Z. Polynucleotides encoding a polypeptide comprising, or alternatively consisting of the polypeptide sequence of SEQ ID NO:Y and/or a polypeptide sequence encoded by the cDNA contained in ATCC deposit Z are also encompassed by the invention.

[1561] Signal Sequences

[1562] The present invention also encompasses mature forms of the polypeptide having the polypeptide sequence of SEQ ID NO:Y and/or the polypeptide sequence encoded by the cDNA in a deposited clone. Polynucleotides encoding the mature forms (such as, for example, the polynucleotide sequence in SEQ ID NO:X and/or the polynucleotide sequence contained in the cDNA of a deposited clone) are also encompassed by the invention. According to the signal hypothesis, proteins secreted by mammalian cells have a signal or secretary leader sequence which is cleaved from the mature protein once export of the growing protein chain across the rough endoplasmic reticulum has been initiated. Most mammalian cells and even insect cells cleave secreted proteins with the same specificity. However, in some cases, cleavage of a secreted protein is not entirely uniform, which results in two or more mature species of the protein. Further, it has long been known that cleavage specificity of a secreted protein is ultimately determined by the primary structure of the complete protein, that is, it is inherent in the amino acid sequence of the polypeptide.

[1563] Methods for predicting whether a protein has a signal sequence, as well as the cleavage point for that sequence, are available. For instance, the method of McGeoch, Virus Res. 3:271-286 (1985), uses the information from a short N-terminal charged region and a subsequent uncharged region of the complete (uncleaved) protein. The method of von Heinje, Nucleic Acids Res. 14:4683-4690 (1986) uses the information from the residues surrounding the cleavage site, typically residues −13 to +2, where +1 indicates the amino terminus of the secreted protein. The accuracy of predicting the cleavage points of known mammalian secretory proteins for each of these methods is in the range of 75-80%. (von Heinje, supra.) However, the two methods do not always produce the same predicted cleavage point(s) for a given protein.

[1564] In the present case, the deduced amino acid sequence of the secreted polypeptide was analyzed by a computer program called SignalP (Henrik Nielsen et al., Protein Engineering 10: 1-6 (1997)), which predicts the cellular location of a protein based on the amino acid sequence. As part of this computational prediction of localization, the methods of McGeoch and von Heinje are incorporated. The analysis of the amino acid sequences of the secreted proteins described herein by this program provided the results shown in Table 1.

[1565] As one of ordinary skill would appreciate, however, cleavage sites sometimes vary from organism to organism and cannot be predicted with absolute certainty. Accordingly, the present invention provides secreted polypeptides having a sequence shown in SEQ ID NO:Y which have an N-terminus beginning within 5 residues (i.e., + or −5 residues) of the predicted cleavage point. Similarly, it is also recognized that in some cases, cleavage of the signal sequence from a secreted protein is not entirely uniform, resulting in more than one secreted species. These polypeptides, and the polynucleotides encoding such polypeptides, are contemplated by the present invention.

[1566] Moreover, the signal sequence identified by the above analysis may not necessarily predict the naturally occurring signal sequence. For example, the naturally occurring signal sequence may be further upstream from the predicted signal sequence. However, it is likely that the predicted signal sequence will be capable of directing the secreted protein to the ER. Nonetheless, the present invention provides the mature protein produced by expression of the polynucleotide sequence of SEQ ID NO:X and/or the polynucleotide sequence contained in the cDNA of a deposited clone, in a mammalian cell (e.g., COS cells, as desribed below). These polypeptides, and the polynucleotides encoding such polypeptides, are contemplated by the present invention.

[1567] Polynucleotide and Polypeptide Variants

[1568] The present invention is directed to variants of the polynucleotide sequence disclosed in SEQ ID NO:X, the complementary strand thereto, and/or the cDNA sequence contained in a deposited clone.

[1569] The present invention also encompasses variants of the polypeptide sequence disclosed in SEQ ID NO:Y and/or encoded by a deposited clone.

[1570] “Variant” refers to a polynucleotide or polypeptide differing from the polynucleotide or polypeptide of the present invention, but retaining essential properties thereof. Generally, variants are overall closely similar, and, in many regions, identical to the polynucleotide or polypeptide of the present invention.

[1571] The present invention is also directed to nucleic acid molecules which comprise, or alternatively consist of, a nucleotide sequence which is at least 80%, 85%, 90%, 95%, 96%, 97%, 98% or 99% identical to, for example, the nucleotide coding sequence in SEQ ID NO:X or the complementary strand thereto, the nucleotide coding sequence contained in a deposited cDNA clone or the complementary strand thereto, a nucleotide sequence encoding the polypeptide of SEQ ID NO:Y, a nucleotide sequence encoding the polypeptide encoded by the cDNA contained in a deposited clone, and/or polynucleotide fragments of any of these nucleic acid molecules (e.g., those fragments described herein). Polynucleotides which hybridize to these nucleic acid molecules under stringent hybridization conditions or lower stringency conditions are also encompassed by the invention, as are polypeptides encoded by these polynucleotides.

[1572] The present invention is also directed to polypeptides which comprise, or alternatively consist of, an amino acid sequence which is at least 80%, 85%, 90%, 95%, 96%, 97%, 98%, 99% identical to, for example, the polypeptide sequence shown in SEQ ID NO:Y, the polypeptide sequence encoded by the cDNA contained in a deposited clone, and/or polypeptide fragments of any of these polypeptides (e.g., those fragments described herein).

[1573] By a nucleic acid having a nucleotide sequence at least, for example, 95% “identical” to a reference nucleotide sequence of the present invention, it is intended that the nucleotide sequence of the nucleic acid is identical to the reference sequence except that the nucleotide sequence may include up to five point mutations per each 100 nucleotides of the reference nucleotide sequence encoding the polypeptide. In other words, to obtain a nucleic acid having a nucleotide sequence at least 95% identical to a reference nucleotide sequence, up to 5% of the nucleotides in the reference sequence may be deleted or substituted with another nucleotide, or a number of nucleotides up to 5% of the total nucleotides in the reference sequence may be inserted into the reference sequence. The query sequence may be an entire sequence shown in Table 1, the ORF (open reading frame), or any fragment specified as described herein.

[1574] As a practical matter, whether any particular nucleic acid molecule or polypeptide is at least 80%, 85%, 90%, 95%, 96%, 97%, 98% or 99% identical to a nucleotide sequence of the presence invention can be determined conventionally using known computer programs. A preferred method for determining the best overall match between a query sequence (a sequence of the present invention) and a subject sequence, also referred to as a global sequence alignment, can be determined using the FASTDB computer program based on the algorithm of Brutlag et al. (Comp. App. Biosci. 6:237-245(1990)). In a sequence alignment the query and subject sequences are both DNA sequences. An RNA sequence can be compared by converting U's to T's. The result of said global sequence alignment is in percent identity. Preferred parameters used in a FASTDB alignment of DNA sequences to calculate percent identiy are: Matrix=Unitary, k-tuple=4, Mismatch Penalty=1, Joining Penalty=30, Randomization Group Length=0, Cutoff Score=1, Gap Penalty=5, Gap Size Penalty 0.05, Window Size=500 or the lenght of the subject nucleotide sequence, whichever is shorter.

[1575] If the subject sequence is shorter than the query sequence because of 5′ or 3′ deletions, not because of internal deletions, a manual correction must be made to the results. This is because the FASTDB program does not account for 5′ and 3′ truncations of the subject sequence when calculating percent identity. For subject sequences truncated at the 5′ or 3′ ends, relative to the query sequence, the percent identity is corrected by calculating the number of bases of the query sequence that are 5′ and 3′ of the subject sequence, which are not matched/aligned, as a percent of the total bases of the query sequence. Whether a nucleotide is matched/aligned is determined by results of the FASTDB sequence alignment. This percentage is then subtracted from the percent identity, calculated by the above FASTDB program using the specified parameters, to arrive at a final percent identity score. This corrected score is what is used for the purposes of the present invention. Only bases outside the 5′ and 3′ bases of the subject sequence, as displayed by the FASTDB alignment, which are not matched/aligned with the query sequence, are calculated for the purposes of manually adjusting the percent identity score.

[1576] For example, a 90 base subject sequence is aligned to a 100 base query sequence to determine percent identity. The deletions occur at the 5′ end of the subject sequence and therefore, the FASTDB alignment does not show a matched/alignment of the first 10 bases at 5′ end. The 10 unpaired bases represent 110% of the sequence (number of bases at the 5′ and 3′ ends not matched/total number of bases in the query sequence) so 10% is subtracted from the percent identity score calculated by the FASTDB program. If the remaining 90 bases were perfectly matched the final percent identity would be 90%. In another example, a 90 base subject sequence is compared with a 100 base query sequence. This time the deletions are internal deletions so that there are no bases on the 5′ or 3′ of the subject sequence which are not matched/aligned with the query. In this case the percent identity calculated by FASTDB is not manually corrected. Once again, only bases 5′ and 3′ of the subject sequence which are not matched/aligned with the query sequence are manually corrected for. No other manual corrections are to made for the purposes of the present invention.

[1577] By a polypeptide having an amino acid sequence at least, for example, 95% “identical” to a query amino acid sequence of the present invention, it is intended that the amino acid sequence of the subject polypeptide is identical to the query sequence except that the subject polypeptide sequence may include up to five amino acid alterations per each 100 amino acids of the query amino acid sequence. In other words, to obtain a polypeptide having an amino acid sequence at least 95% identical to a query amino acid sequence, up to 5% of the amino acid residues in the subject sequence may be inserted, deleted, (indels) or substituted with another amino acid. These alterations of the reference sequence may occur at the amino or carboxy terminal positions of the reference amino acid sequence or anywhere between those terminal positions, interspersed either individually among residues in the reference sequence or in one or more contiguous groups within the reference sequence.

[1578] As a practical matter, whether any particular polypeptide is at least 80%, 85%, 90%, 95%, 96%, 97%, 98% or 99% identical to, for instance, an amino acid sequences shown in Table 1 (SEQ ID NO:Y) or to the amino acid sequence encoded by cDNA contained in a deposited clone can be determined conventionally using known computer programs. A preferred method for determing the best overall match between a query sequence (a sequence of the present invention) and a subject sequence, also referred to as a global sequence alignment, can be determined using the FASTDB computer program based on the algorithm of Brutlag et al. (Comp. App. Biosci. 6:237-245(1990)). In a sequence alignment the query and subject sequences are either both nucleotide sequences or both amino acid sequences. The result of said global sequence alignment is in percent identity. Preferred parameters used in a FASTDB amino acid alignment are: Matrix=PAM 0, k-tuple=2, Mismatch Penalty=1, Joining Penalty-20, Randomization Group Length=0, Cutoff Score=1, Window Size=sequence length, Gap Penalty=5, Gap Size Penalty=0.05, Window Size=500 or the length of the subject amino acid sequence, whichever is shorter.

[1579] If the subject sequence is shorter than the query sequence due to N- or C-terminal deletions, not because of internal deletions, a manual correction must be made to the results. This is because the FASTDB program does not account for N- and C-terminal truncations of the subject sequence when calculating global percent identity. For subject sequences truncated at the N- and C-termini, relative to the query sequence, the percent identity is corrected by calculating the number of residues of the query sequence that are N- and C-terminal of the subject sequence, which are not matched/aligned with a corresponding subject residue, as a percent of the total bases of the query sequence. Whether a residue is matched/aligned is determined by results of the FASTDB sequence alignment. This percentage is then subtracted from the percent identity, calculated by the above FASTDB program using the specified parameters, to arrive at a final percent identity score. This final percent identity score is what is used for the purposes of the present invention. Only residues to the N- and C-termini of the subject sequence, which are not matched/aligned with the query sequence, are considered for the purposes of manually adjusting the percent identity score. That is, only query residue positions outside the farthest N- and C-terminal residues of the subject sequence.

[1580] For example, a 90 amino acid residue subject sequence is aligned with a 100 residue query sequence to determine percent identity. The deletion occurs at the N-terminus of the subject sequence and therefore, the FASTDB alignment does not show a matching/alignment of the first 10 residues at the N-terminus. The 10 unpaired residues represent 10% of the sequence (number of residues at the N- and C-termini not matched/total number of residues in the query sequence) so 10% is subtracted from the percent identity score calculated by the FASTDB program. If the remaining 90 residues were perfectly matched the final percent identity would be 90%. In another example, a 90 residue subject sequence is compared with a 100 residue query sequence. This time the deletions are internal deletions so there are no residues at the N- or C-termini of the subject sequence which are not matched/aligned with the query. In this case the percent identity calculated by FASTDB is not manually corrected. Once again, only residue positions outside the N- and C-terminal ends of the subject sequence, as displayed in the FASTDB alignment, which are not matched/aligned with the query sequnce are manually corrected for. No other manual corrections are to made for the purposes of the present invention.

[1581] The variants may contain alterations in the coding regions, non-coding regions, or both. Especially preferred are polynucleotide variants containing alterations which produce silent substitutions, additions, or deletions, but do not alter the properties or activities of the encoded polypeptide. Nucleotide variants produced by silent substitutions due to the degeneracy of the genetic code are preferred. Moreover, variants in which 5-10, 1-5, or 1-2 amino acids are substituted, deleted, or added in any combination are also preferred. Polynucleotide variants can be produced for a variety of reasons, e.g., to optimize codon expression for a particular host (change codons in the human mRNA to those preferred by a bacterial host such as E. coli).

[1582] Naturally occurring variants are called “allelic variants,” and refer to one of several alternate forms of a gene occupying a given locus on a chromosome of an organism. (Genes II, Lewin, B., ed., John Wiley & Sons, New York (1985).) These allelic variants can vary at either the polynucleotide and/or polypeptide level and are included in the present invention. Alternatively, non-naturally occurring variants may be produced by mutagenesis techniques or by direct synthesis.

[1583] Using known methods of protein engineering and recombinant DNA technology, variants may be generated to improve or alter the characteristics of the polypeptides of the present invention. For instance, one or more amino acids can be deleted from the N-terminus or C-terminus of the secreted protein without substantial loss of biological function. The authors of Ron et al., J. Biol. Chem. 268: 2984-2988 (1993), reported variant KGF proteins having heparin binding activity even after deleting 3, 8, or 27 amino-terminal amino acid residues. Similarly, Interferon gamma exhibited up to ten times higher activity after deleting 8-10 amino acid residues from the carboxy terminus of this protein. (Dobeli et al., J. Biotechnology 7:199-216 (1988).)

[1584] Moreover, ample evidence demonstrates that variants often retain a biological activity similar to that of the naturally occurring protein. For example, Gayle and coworkers (J. Biol. Chem 268:22105-22111 (1993)) conducted extensive mutational analysis of human cytokine IL-1a. They used random mutagenesis to generate over 3,500 individual IL-1a mutants that averaged 2.5 amino acid changes per variant over the entire length of the molecule. Multiple mutations were examined at every possible amino acid position. The investigators found that “[m]ost of the molecule could be altered with little effect on either [binding or biological activity].” (See, Abstract.) In fact, only 23 unique amino acid sequences, out of more than 3,500 nucleotide sequences examined, produced a protein that significantly differed in activity from wild-type.

[1585] Furthermore, even if deleting one or more amino acids from the N-terminus or C-terminus of a polypeptide results in modification or loss of one or more biological functions, other biological activities may still be retained. For example, the ability of a deletion variant to induce and/or to bind antibodies which recognize the secreted form will likely be retained when less than the majority of the residues of the secreted form are removed from the N-terminus or C-terminus. Whether a particular polypeptide lacking N- or C-terminal residues of a protein retains such immunogenic activities can readily be determined by routine methods described herein and otherwise known in the art.

[1586] Thus, the invention further includes polypeptide variants which show substantial biological activity. Such variants include deletions, insertions, inversions, repeats, and substitutions selected according to general rules known in the art so as have little effect on activity. For example, guidance concerning how to make phenotypically silent amino acid substitutions is provided in Bowie et al., Science 247:1306-1310 (1990), wherein the authors indicate that there are two main strategies for studying the tolerance of an amino acid sequence to change.

[1587] The first strategy exploits the tolerance of amino acid substitutions by natural selection during the process of evolution. By comparing amino acid sequences in different species, conserved amino acids can be identified. These conserved amino acids are likely important for protein function. In contrast, the amino acid positions where substitutions have been tolerated by natural selection indicates that these positions are not critical for protein function. Thus, positions tolerating amino acid substitution could be modified while still maintaining biological activity of the protein.

[1588] The second strategy uses genetic engineering to introduce amino acid changes at specific positions of a cloned gene to identify regions critical for protein function. For example, site directed mutagenesis or alanine-scanning mutagenesis (introduction of single alanine mutations at every residue in the molecule) can be used. (Cunningham and Wells, Science 244:1081-1085 (1989).) The resulting mutant molecules can then be tested for biological activity.

[1589] As the authors state, these two strategies have revealed that proteins are surprisingly tolerant of amino acid substitutions. The authors further indicate which amino acid changes are likely to be permissive at certain amino acid positions in the protein. For example, most buried (within the tertiary structure of the protein) amino acid residues require nonpolar side chains, whereas few features of surface side chains are generally conserved. Moreover, tolerated conservative amino acid substitutions involve replacement of the aliphatic or hydrophobic amino acids Ala, Val, Leu and Ile; replacement of the hydroxyl residues Ser and Thr; replacement of the acidic residues Asp and Glu; replacement of the amide residues Asn and Gln, replacement of the basic residues Lys, Arg, and His; replacement of the aromatic residues Phe, Tyr, and Trp, and replacement of the small-sized amino acids Ala, Ser, Thr, Met, and Gly.

[1590] Besides conservative amino acid substitution, variants of the present invention include (i) substitutions with one or more of the non-conserved amino acid residues, where the substituted amino acid residues may or may not be one encoded by the genetic code, or (ii) substitution with one or more of amino acid residues having a substituent group, or (iii) fusion of the mature polypeptide with another compound, such as a compound to increase the stability and/or solubility of the polypeptide (for example, polyethylene glycol), or (iv) fusion of the polypeptide with additional amino acids, such as, for example, an IgG Fc fusion region peptide, or leader or secretory sequence, or a sequence facilitating purification or (v) fusion of the polypeptide with another compound, such as albumin (including, but not limited to, recombinant albumin (see, e.g., U.S. Pat. No. 5,876,969, issued Mar. 2, 1999, EP Patent 0 413 622, and U.S. Pat. No. 5,766,883, issued Jun. 16, 1998, herein incorporated by reference in their entirety)). Such variant polypeptides are deemed to be within the scope of those skilled in the art from the teachings herein.

[1591] For example, polypeptide variants containing amino acid substitutions of charged amino acids with other charged or neutral amino acids may produce proteins with improved characteristics, such as less aggregation. Aggregation of pharmaceutical formulations both reduces activity and increases clearance due to the aggregate's immunogenic activity. (Pinckard et al., Clin. Exp. Immunol. 2:331-340 (1967); Robbins et al., Diabetes 36: 838-845 (1987); Cleland et al., Crit. Rev. Therapeutic Drug Carrier Systems 10:307-377 (1993).)

[1592] A further embodiment of the invention relates to a polypeptide which comprises the amino acid sequence of the present invention having an amino acid sequence which contains at least one amino acid substitution, but not more than 50 amino acid substitutions, even more preferably, not more than 40 amino acid substitutions, still more preferably, not more than 30 amino acid substitutions, and still even more preferably, not more than 20 amino acid substitutions. Of course, in order of ever-increasing preference, it is highly preferable for a peptide or polypeptide to have an amino acid sequence which comprises the amino acid sequence of the present invention, which contains at least one, but not more than 10, 9, 8, 7, 6, 5, 4, 3, 2 or 1 amino acid substitutions. In specific embodiments, the number of additions, substitutions, and/or deletions in the amino acid sequence of the present invention or fragments thereof (e.g., the mature form and/or other fragments described herein), is 1-5,5-10, 5-25, 5-50, 10-50 or 50-150, conservative amino acid substitutions are preferable.

[1593] Polynucleotide and Polypeptide Fragments

[1594] The present invention is also directed to polynucleotide fragments of the polynucleotides of the invention.

[1595] In the present invention, a “polynucleotide fragment” refers to a short polynucleotide having a nucleic acid sequence which: is a portion of that contained in a deposited clone, or encoding the polypeptide encoded by the cDNA in a deposited clone; is a portion of that shown in SEQ ID NO:X or the complementary strand thereto, or is a portion of a polynucleotide sequence encoding the polypeptide of SEQ ID NO:Y. The nucleotide fragments of the invention are preferably at least about 15 nt, and more preferably at least about 20 nt, still more preferably at least about 30 nt, and even more preferably, at least about 40 nt, at least about 50 nt, at least about 75 nt, or at least about 150 nt in length. A fragment “at least 20 nt in length,” for example, is intended to include 20 or more contiguous bases from the cDNA sequence contained in a deposited clone or the nucleotide sequence shown in SEQ ID NO:X. In this context “about” includes the particularly recited value, a value larger or smaller by several (5, 4, 3, 2, or 1) nucleotides, at either terminus or at both termini. These nucleotide fragments have uses that include, but are not limited to, as diagnostic probes and primers as discussed herein. Of course, larger fragments (e.g., 50, 150, 500, 600, 2000 nucleotides) are preferred.

[1596] Moreover, representative examples of polynucleotide fragments of the invention, include, for example, fragments comprising, or alternatively consisting of, a sequence from about nucleotide number 1-50, 51-100, 101-150, 151-200, 201-250, 251-300, 301-350, 351-400, 401-450, 451-500, 501-550, 551-600, 651-700, 701-750, 751-800, 800-850, 851-900, 901-950, 951-1000, 1001-1050, 1051-1100, 1101-1150, 1151-1200, 1201-1250, 1251-1300, 1301-1350, 1351-1400, 1401-1450, 1451-1500, 1501-1550, 1551-1600, 1601-1650, 1651-1700, 1701-1750, 1751-1800, 1801-1850, 1851-1900, 1901-1950, 1951-2000, or 2001 to the end of SEQ ID NO:X, or the complementary strand thereto, or the cDNA contained in a deposited clone. In this context “about” includes the particularly recited ranges, and ranges larger or smaller by several (5, 4, 3, 2, or 1) nucleotides, at either terminus or at both termini. Preferably, these fragments encode a polypeptide which has biological activity. More preferably, these polynucleotides can be used as probes or primers as discussed herein. Polynucleotides which hybridize to these nucleic acid molecules under stringent hybridization conditions or lower stringency conditions are also encompassed by the invention, as are polypeptides encoded by these polynucleotides.

[1597] In the present invention, a “polypeptide fragment” refers to an amino acid sequence which is a portion of that contained in SEQ ID NO:Y or encoded by the cDNA contained in a deposited clone. Protein (polypeptide) fragments may be “free-standing,” or comprised within a larger polypeptide of which the fragment forms a part or region, most preferably as a single continuous region. Representative examples of polypeptide fragments of the invention, include, for example, fragments comprising, or alternatively consisting of, from about amino acid number 1-20, 21-40, 41-60, 61-80, 81-100, 102-120, 121-140, 141-160, or 161 to the end of the coding region. Moreover, polypeptide fragments can be about 20, 30, 40, 50, 60, 70, 80, 90, 100, 110, 120, 130, 140, or 150 amino acids in length. In this context “about” includes the particularly recited ranges or values, and ranges or values larger or smaller by several (5, 4, 3, 2, or 1) amino acids, at either extreme or at both extremes. Polynucleotides encoding these polypeptides are also encompassed by the invention.

[1598] Preferred polypeptide fragments include the secreted protein as well as the mature form. Further preferred polypeptide fragments include the secreted protein or the mature form having a continuous series of deleted residues from the amino or the carboxy terminus, or both. For example, any number of amino acids, ranging from 1-60, can be deleted from the amino terminus of either the secreted polypeptide or the mature form. Similarly, any number of amino acids, ranging from 1-30, can be deleted from the carboxy terminus of the secreted protein or mature form. Furthermore, any combination of the above amino and carboxy terminus deletions are preferred. Similarly, polynucleotides encoding these polypeptide fragments are also preferred.

[1599] Also preferred are polypeptide and polynucleotide fragments characterized by structural or functional domains, such as fragments that comprise alpha-helix and alpha-helix forming regions, beta-sheet and beta-sheet-forming regions, turn and turn-forming regions, coil and coil-forming regions, hydrophilic regions, hydrophobic regions, alpha amphipathic regions, beta amphipathic regions, flexible regions, surface-forming regions, substrate binding region, and high antigenic index regions. Polypeptide fragments of SEQ ID NO:Y falling within conserved domains are specifically contemplated by the present invention. Moreover, polynucleotides encoding these domains are also contemplated.

[1600] Other preferred polypeptide fragments are biologically active fragments. Biologically active fragments are those exhibiting activity similar, but not necessarily identical, to an activity of the polypeptide of the present invention. The biological activity of the fragments may include an improved desired activity, or a decreased undesirable activity. Polynucleotides encoding these polypeptide fragments are also encompassed by the invention.

[1601] Preferably, the polynucleotide fragments of the invention encode a polypeptide which demonstrates a functional activity. By a polypeptide demonstrating a “functional activity” is meant, a polypeptide capable of displaying one or more known functional activities associated with a full-length (complete) polypeptide of invention protein. Such functional activities include, but are not limited to, biological activity, antigenicity [ability to bind (or compete with a polypeptide of the invention for binding) to an antibody to the polypeptide of the invention], immunogenicity (ability to generate antibody which binds to a polypeptide of the invention), ability to form multimers with polypeptides of the invention, and ability to bind to a receptor or ligand for a polypeptide of the invention.

[1602] The functional activity of polypeptides of the invention, and fragments, variants derivatives, and analogs thereof, can be assayed by various methods.

[1603] For example, in one embodiment where one is assaying for the ability to bind or compete with full-length polypeptide of the invention for binding to an antibody of the polypeptide of the invention, various immunoassays known in the art can be used, including but not limited to, competitive and non-competitive assay systems using techniques such as radioimmunoassays, ELISA (enzyme linked immunosorbent assay), “sandwich” immunoassays, immunoradiometric assays, gel diffusion precipitation reactions, immunodiffusion assays, in situ immunoassays (using colloidal gold, enzyme or radioisotope labels, for example), western blots, precipitation reactions, agglutination assays (e.g., gel agglutination assays, hemagglutination assays), complement fixation assays, immunofluorescence assays, protein A assays, and immunoelectrophoresis assays, etc. In one embodiment, antibody binding is detected by detecting a label on the primary antibody. In another embodiment, the primary antibody is detected by detecting binding of a secondary antibody or reagent to the primary antibody. In a further embodiment, the secondary antibody is labeled. Many means are known in the art for detecting binding in an immunoassay and are within the scope of the present invention.

[1604] In another embodiment, where a ligand for a polypeptide of the invention identified, or the ability of a polypeptide fragment, variant or derivative of the invention to multimerize is being evaluated, binding can be assayed, e.g., by means well-known in the art, such as, for example, reducing and non-reducing gel chromatography, protein affinity chromatography, and affinity blotting. See generally, Phizicky, E., et al., 1995, Microbiol. Rev. 59:94-123. In another embodiment, physiological correlates of binding of a polypeptide of the invention to its substrates (signal transduction) can be assayed.

[1605] In addition, assays described herein (see Examples) and otherwise known in the art may routinely be applied to measure the ability of polypeptides of the invention and fragments, variants derivatives and analogs thereof to elicit related biological activity related to that of the polypeptide of the invention (either in vitro or in vivo). Other methods will be known to the skilled artisan and are within the scope of the invention.

[1606] Epitopes and Antibodies

[1607] The present invention encompasses polypeptides comprising, or alternatively consisting of, an epitope of the polypeptide having an amino acid sequence of SEQ ID NO:Y, or an epitope of the polypeptide sequence encoded by a polynucleotide sequence contained in ATCC deposit No. Z or encoded by a polynucleotide that hybridizes to the complement of the sequence of SEQ ID NO:X or contained in ATCC deposit No. Z under stringent hybridization conditions or lower stringency hybridization conditions as defined supra. The present invention further encompasses polynucleotide sequences encoding an epitope of a polypeptide sequence of the invention (such as, for example, the sequence disclosed in SEQ ID NO:X), polynucleotide sequences of the complementary strand of a polynucleotide sequence encoding an epitope of the invention, and polynucleotide sequences which hybridize to the complementary strand under stringent hybridization conditions or lower stringency hybridization conditions defined supra.

[1608] The term “epitopes,” as used herein, refers to portions of a polypeptide having antigenic or immunogenic activity in an animal, preferably a mammal, and most preferably in a human. In a preferred embodiment, the present invention encompasses a polypeptide comprising an epitope, as well as the polynucleotide encoding this polypeptide. An “immunogenic epitope,” as used herein, is defined as a portion of a protein that elicits an antibody response in an animal, as determined by any method known in the art, for example, by the methods for generating antibodies described infra. (See, for example, Geysen et al., Proc. Natl. Acad. Sci. USA 81:3998-4002 (1983)). The term “antigenic epitope,” as used herein, is defined as a portion of a protein to which an antibody can immunospecifically bind its antigen as determined by any method well known in the art, for example, by the immunoassays described herein. Immunospecific binding excludes non-specific binding but does not necessarily exclude cross-reactivity with other antigens. Antigenic epitopes need not necessarily be immunogenic.

[1609] Fragments which function as epitopes may be produced by any conventional means. (See, e.g., Houghten, Proc. Natl. Acad. Sci. USA 82:5131-5135 (1985), further described in U.S. Pat. No. 4,631,211).

[1610] In the present invention, antigenic epitopes preferably contain a sequence of at least 4, at least 5, at least 6, at least 7, more preferably at least 8, at least 9, at least 10, at least 11, at least 12, at least 13, at least 14, at least 15, at least 20, at least 25, at least 30, at least 40, at least 50, and, most preferably, between about 15 to about 30 amino acids. Preferred polypeptides comprising immunogenic or antigenic epitopes are at least 10, 15, 20, 25, 30, 35, 40, 45, 50, 55, 60, 65, 70, 75, 80, 85, 90, 95, or 100 amino acid residues in length. Additional non-exclusive preferred antigenic epitopes include the antigenic epitopes disclosed herein, as well as portions thereof. Antigenic epitopes are useful, for example, to raise antibodies, including monoclonal antibodies, that specifically bind the epitope. Preferred antigenic epitopes include the antigenic epitopes disclosed herein, as well as any combination of two, three, four, five or more of these antigenic epitopes. Antigenic epitopes can be used as the target molecules in immunoassays. (See, for instance, Wilson et al., Cell 37:767-778 (1984); Sutcliffe et al., Science 219:660-666 (1983)).

[1611] Similarly, immunogenic epitopes can be used, for example, to induce antibodies according to methods well known in the art. (See, for instance, Sutcliffe et al., supra; Wilson et al., supra; Chow et al., Proc. Natl. Acad. Sci. USA 82:910-914; and Bittle et al., J. Gen. Virol. 66:2347-2354 (1985). Preferred immunogenic epitopes include the immunogenic epitopes disclosed herein, as well as any combination of two, three, four, five or more of these immunogenic epitopes. The polypeptides comprising one or more immunogenic epitopes may be presented for eliciting an antibody response together with a carrier protein, such as an albumin, to an animal system (such as rabbit or mouse), or, if the polypeptide is of sufficient length (at least about 25 amino acids), the polypeptide may be presented without a carrier. However, immunogenic epitopes comprising as few as 8 to 10 amino acids have been shown to be sufficient to raise antibodies capable of binding to, at the very least, linear epitopes in a denatured polypeptide (e.g., in Western blotting).

[1612] Epitope-bearing polypeptides of the present invention may be used to induce antibodies according to methods well known in the art including, but not limited to, in vivo immunization, in vitro immunization, and phage display methods. See, e.g., Sutcliffe et al., supra; Wilson et al., supra, and Bittle et al., J. Gen. Virol., 66:2347-2354 (1985). If in vivo immunization is used, animals may be immunized with free peptide; however, anti-peptide antibody titer may be boosted by coupling the peptide to a macromolecular carrier, such as keyhole limpet hemacyanin (KLH) or tetanus toxoid. For instance, peptides containing cysteine residues may be coupled to a carrier using a linker such as maleimidobenzoyl-N-hydroxysuccinimide ester (MBS), while other peptides may be coupled to carriers using a more general linking agent such as glutaraldehyde. Animals such as rabbits, rats and mice are immunized with either free or carrier-coupled peptides, for instance, by intraperitoneal and/or intradermal injection of emulsions containing about 100 μg of peptide or carrier protein and Freund's adjuvant or any other adjuvant known for stimulating an immune response. Several booster injections may be needed, for instance, at intervals of about two weeks, to provide a useful titer of anti-peptide antibody which can be detected, for example, by ELISA assay using free peptide adsorbed to a solid surface. The titer of anti-peptide antibodies in serum from an immunized animal may be increased by selection of anti-peptide antibodies, for instance, by adsorption to the peptide on a solid support and elution of the selected antibodies according to methods well known in the art.

[1613] As one of skill in the art will appreciate, and as discussed above, the polypeptides of the present invention (e.g., those comprising an immunogenic or antigenic epitope) can be fused to heterologous polypeptide sequences. For example, polypeptides of the present invention (including fragments or variants thereof), may be fused with the constant domain of immunoglobulins (IgA, IgE, IgG, IgM), or portions thereof (CH1, CH2, CH3, or any combination thereof and portions thereof, resulting in chimeric polypeptides. By way of another non-limiting example, polypeptides and/or antibodies of the present invention (including fragments or variants thereof) may be fused with albumin (including but not limited to recombinant human serum albumin or fragments or variants thereof (see, e.g., U.S. Pat. No. 5,876,969, issued Mar. 2, 1999, EP Patent 0 413 622, and U.S. Pat. No. 5,766,883, issued Jun. 16, 1998, herein incorporated by reference in their entirety)). In a preferred embodiment, polypeptides and/or antibodies of the present invention (including fragments or variants thereof) are fused with the mature form of human serum albumin (i.e., amino acids 1-585 of human serum albumin as shown in FIGS. 1 and 2 of EP Patent 0 322 094) which is herein incorporated by reference in its entirety. In another preferred embodiment, polypeptides and/or antibodies of the present invention (including fragments or variants thereof) are fused with polypeptide fragments comprising, or alternatively consisting of, amino acid residues 1-z of human serum albumin, where z is an integer from 369 to 419, as described in U.S. Pat. No. 5,766,883 herein incorporated by reference in its entirety. Polypeptides and/or antibodies of the present invention (including fragments or variants thereof) may be fused to either the N- or C-terminal end of the heterologous protein (e.g., immunoglobulin Fc polypeptide or human serum albumin polypeptide). Polynucleotides encoding fusion proteins of the invention are also encompassed by the invention.

[1614] Such fusion proteins may facilitate purification and may increase half-life in vivo. This has been shown for chimeric proteins consisting of the first two domains of the human CD4-polypeptide and various domains of the constant regions of the heavy or light chains of mammalian immunoglobulins. See, e.g., EP 394,827; Traunecker et al., Nature, 331:84-86 (1988). Enhanced delivery of an antigen across the epithelial barrier to the immune system has been demonstrated for antigens (e.g., insulin) conjugated to an FcRn binding partner such as IgG or Fc fragments (see, e.g., PCT Publications WO 96/22024 and WO 99/04813). IgG Fusion proteins that have a disulfide-linked dimeric structure due to the IgG portion desulfide bonds have also been found to be more efficient in binding and neutralizing other molecules than monomeric polypeptides or fragments thereof alone. See, e.g., Fountoulakis et al., J. Biochem., 270:3958-3964 (1995). Nucleic acids encoding the above epitopes can also be recombined with a gene of interest as an epitope tag (e.g., the hemagglutinin (“HA”) tag or flag tag) to aid in detection and purification of the expressed polypeptide. For example, a system described by Janknecht et al. allows for the ready purification of non-denatured fusion proteins expressed in human cell lines (Janknecht et al., 1991, Proc. Natl. Acad. Sci. USA 88:8972-897). In this system, the gene of interest is subcloned into a vaccinia recombination plasmid such that the open reading frame of the gene is translationally fused to an amino-terminal tag consisting of six histidine residues. The tag serves as a matrix binding domain for the fusion protein. Extracts from cells infected with the recombinant vaccinia virus are loaded onto Ni2+ nitriloacetic acid-agarose column and histidine-tagged proteins can be selectively eluted with imidazole-containing buffers.

[1615] Additional fusion proteins of the invention may be generated through the techniques of gene-shuffling, motif-shuffling, exon-shuffling, and/or codon-shuffling (collectively referred to as “DNA shuffling”). DNA shuffling may be employed to modulate the activities of polypeptides of the invention, such methods can be used to generate polypeptides with altered activity, as well as agonists and antagonists of the polypeptides. See, generally, U.S. Pat. Nos. 5,605,793; 5,811,238; 5,830,721; 5,834,252; and 5,837,458, and Patten et al., Curr. Opinion Biotechnol. 8:724-33 (1997); Harayama, Trends Biotechnol. 16(2):76-82 (1998); Hansson, et al., J. Mol.

[1616] Biol. 287:265-76 (1999); and Lorenzo and Blasco, Biotechniques 24(2):308-13 (1998) (each of these patents and publications are hereby incorporated by reference in its entirety). In one embodiment, alteration of polynucleotides corresponding to SEQ ID NO:X and the polypeptides encoded by these polynucleotides may be achieved by DNA shuffling. DNA shuffling involves the assembly of two or more DNA segments by homologous or site-specific recombination to generate variation in the polynucleotide sequence. In another embodiment, polynucleotides of the invention, or the encoded polypeptides, may be altered by being subjected to random mutagenesis by error-prone PCR, random nucleotide insertion or other methods prior to recombination. In another embodiment, one or more components, motifs, sections, parts, domains, fragments, etc., of a polynucleotide encoding a polypeptide of the invention may be recombined with one or more components, motifs, sections, parts, domains, fragments, etc. of one or more heterologous molecules.

[1617] Antibodies

[1618] Further polypeptides of the invention relate to antibodies and T-cell antigen receptors (TCR) which immunospecifically bind a polypeptide, polypeptide fragment, or variant of SEQ ID NO:Y, and/or an epitope, of the present invention (as determined by immunoassays well known in the art for assaying specific antibody-antigen binding). Antibodies of the invention include, but are not limited to, polyclonal, monoclonal, multispecific, human, humanized or chimeric antibodies, single chain antibodies, Fab fragments, F(ab′) fragments, fragments produced by a Fab expression library, anti-idiotypic (anti-Id) antibodies (including, e.g., anti-Id antibodies to antibodies of the invention), and epitope-binding fragments of any of the above. The term “antibody,” as used herein, refers to immunoglobulin molecules and immunologically active portions of immunoglobulin molecules, i.e., molecules that contain an antigen binding site that immunospecifically binds an antigen. The immunoglobulin molecules of the invention can be of any type (e.g., IgG, IgE, IgM, IgD, IgA and IgY), class (e.g., IgG1, IgG2, IgG3, IgG4, IgA1 and IgA2) or subclass of immunoglobulin molecule. In preferred embodiments, the immunoglobulin molecules of the invention are IgG1. In other preferred embodiments, the immunoglobulin molecules of the invention are IgG4.

[1619] Most preferably the antibodies are human antigen-binding antibody fragments of the present invention and include, but are not limited to, Fab, Fab′ and F(ab′)2, Fd, single-chain Fvs (scFv), single-chain antibodies, disulfide-linked Fvs (sdFv) and fragments comprising either a VL or VH domain. Antigen-binding antibody fragments, including single-chain antibodies, may comprise the variable region(s) alone or in combination with the entirety or a portion of the following: hinge region, CH1, CH2, and CH3 domains. Also included in the invention are antigen-binding fragments also comprising any combination of variable region(s) with a hinge region, CH1, CH2, and CH3 domains. The antibodies of the invention may be from any animal origin including birds and mammals. Preferably, the antibodies are human, murine (e.g., mouse and rat), donkey, ship rabbit, goat, guinea pig, camel, horse, or chicken. As used herein, “human” antibodies include antibodies having the amino acid sequence of a human immunoglobulin and include antibodies isolated from human immunoglobulin libraries or from animals transgenic for one or more human immunoglobulin and that do not express endogenous immunoglobulins, as described infra and, for example in, U.S. Pat. No. 5,939,598 by Kucherlapati et al.

[1620] The antibodies of the present invention may be monospecific, bispecific, trispecific or of greater multispecificity. Multispecific antibodies may be specific for different epitopes of a polypeptide of the present invention or may be specific for both a polypeptide of the present invention as well as for a heterologous epitope, such as a heterologous polypeptide or solid support material. See, e.g., PCT publications WO 93/17715; WO 92/08802; WO 91/00360; WO 92/05793; Tutt, et al., J. Immunol. 147:60-69 (1991); U.S. Pat. Nos. 4,474,893; 4,714,681; 4,925,648; 5,573,920; 5,601,819; Kostelny et al., J. Immunol. 148:1547-1553 (1992).

[1621] Antibodies of the present invention may be described or specified in terms of the epitope(s) or portion(s) of a polypeptide of the present invention which they recognize or specifically bind. The epitope(s) or polypeptide portion(s) may be specified as described herein, e.g., by N-terminal and C-terminal positions, by size in contiguous amino acid residues, or listed in the Tables and Figures. Antibodies which specifically bind any epitope or polypeptide of the present invention may also be excluded. Therefore, the present invention includes antibodies that specifically bind polypeptides of the present invention, and allows for the exclusion of the same.

[1622] Antibodies of the present invention may also be described or specified in terms of their cross-reactivity. Antibodies that do not bind any other analog, ortholog, or homolog of a polypeptide of the present invention are included. Antibodies that bind polypeptides with at least 95%, at least 90%, at least 85%, at least 80%, at least 75%, at least 70%, at least 65%, at least 60%, at least 55%, and at least 50% identity (as calculated using methods known in the art and described herein) to a polypeptide of the present invention are also included in the present invention. In specific embodiments, antibodies of the present invention cross-react with murine, rat and/or rabbit homologs of human proteins and the corresponding epitopes thereof. Antibodies that do not bind polypeptides with less than 95%, less than 90%, less than 85%, less than 80%, less than 75%, less than 70%, less than 65%, less than 60%, less than 55%, and less than 50% identity (as calculated using methods known in the art and described herein) to a polypeptide of the present invention are also included in the present invention. In a specific embodiment, the above-described cross-reactivity is with respect to any single specific antigenic or immunogenic polypeptide, or combination(s) of 2, 3, 4, 5, or more of the specific antigenic and/or immunogenic polypeptides disclosed herein. Further included in the present invention are antibodies which bind polypeptides encoded by polynucleotides which hybridize to a polynucleotide of the present invention under stringent hybridization conditions (as described herein). Antibodies of the present invention may also be described or specified in terms of their binding affinity to a polypeptide of the invention. Preferred binding affinities include those with a dissociation constant or Kd less than 5×10⁻² M, 10⁻² M, 5×10⁻³ M, 10⁻³ M, 5×10⁻⁴ M, 10⁻⁴ M, 5×10⁻⁵ M, 10⁻⁵ M, 5×10⁻⁶ M, 10⁻⁶M, 5×10⁻⁷ M, 10⁷ M, 5×10⁻⁸ M, 10⁻⁸ M, 5×10⁻⁹ M, 10⁻⁹ M, 5×10⁻¹⁰ M, 10⁻¹⁰ M, 5×10⁻¹¹ M, 10⁻¹¹ M, 5×10⁻¹² M, ¹⁰⁻¹² M, 5×10⁻¹³ M, 10⁻¹³ M, 5×10⁻¹⁴ M, 10⁻¹⁴ M, 5×10⁻¹⁵ M, or 10⁻¹⁵ M.

[1623] The invention also provides antibodies that competitively inhibit binding of an antibody to an epitope of the invention as determined by any method known in the art for determining competitive binding, for example, the immunoassays described herein. In preferred embodiments, the antibody competitively inhibits binding to the epitope by at least 95%, at least 90%, at least 85%, at least 80%, at least 75%, at least 70%, at least 60%, or at least 50%.

[1624] Antibodies of the present invention may act as agonists or antagonists of the polypeptides of the present invention. For example, the present invention includes antibodies which disrupt the receptor/ligand interactions with the polypeptides of the invention either partially or fully. Preferrably, antibodies of the present invention bind an antigenic epitope disclosed herein, or a portion thereof. The invention features both receptor-specific antibodies and ligand-specific antibodies. The invention also features receptor-specific antibodies which do not prevent ligand binding but prevent receptor activation. Receptor activation (i.e., signaling) may be determined by techniques described herein or otherwise known in the art. For example, receptor activation can be determined by detecting the phosphorylation (e.g., tyrosine or serine/threonine) of the receptor or its substrate by immunoprecipitation followed by western blot analysis (for example, as described supra). In specific embodiments, antibodies are provided that inhibit ligand activity or receptor activity by at least 95%, at least 90%, at least 85%, at least 80%, at least 75%, at least 70%, at least 60%, or at least 50% of the activity in absence of the antibody.

[1625] The invention also features receptor-specific antibodies which both prevent ligand binding and receptor activation as well as antibodies that recognize the receptor-ligand complex, and, preferably, do not specifically recognize the unbound receptor or the unbound ligand. Likewise, included in the invention are neutralizing antibodies which bind the ligand and prevent binding of the ligand to the receptor, as well as antibodies which bind the ligand, thereby preventing receptor activation, but do not prevent the ligand from binding the receptor. Further included in the invention are antibodies which activate the receptor. These antibodies may act as receptor agonists, i.e., potentiate or activate either all or a subset of the biological activities of the ligand-mediated receptor activation, for example, by inducing dimerization of the receptor. The antibodies may be specified as agonists, antagonists or inverse agonists for biological activities comprising the specific biological activities of the peptides of the invention disclosed herein. The above antibody agonists can be made using methods known in the art. See, e.g., PCT publication WO 96/40281; U.S. Pat. No. 5,811,097; Deng et al., Blood 92(6):1981-1988 (1998); Chen et al., Cancer Res. 58(16):3668-3678 (1998); Harrop et al., J. Immunol. 161(4):1786-1794 (1998); Zhu et al., Cancer Res. 58(15):3209-3214 (1998); Yoon et al., J. Immunol. 160(7):3170-3179 (1998); Prat et al., J. Cell. Sci. 111(Pt2):237-247 (1998); Pitard et al., J. Immunol. Methods 205(2):177-190 (1997); Liautard et al., Cytokine 9(4):233-241 (1997); Carlson et al., J. Biol. Chem. 272(17):11295-11301 (1997); Taryman et al., Neuron 14(4):755-762 (1995); Muller et al., Structure 6(9):1153-1167 (1998); Bartunek et al., Cytokine 8(1):14-20 (1996) (which are all incorporated by reference herein in their entireties).

[1626] Antibodies of the present invention may be used, for example, but not limited to, to purify, detect, and target the polypeptides of the present invention, including both in vitro and in vivo diagnostic and therapeutic methods. For example, the antibodies have use in immunoassays for qualitatively and quantitatively measuring levels of the polypeptides of the present invention in biological samples. See, e.g., Harlow et al., Antibodies: A Laboratory Manual, (Cold Spring Harbor Laboratory Press, 2nd ed. 1988) (incorporated by reference herein in its entirety).

[1627] As discussed in more detail below, the antibodies of the present invention may be used either alone or in combination with other compositions. The antibodies may further be recombinantly fused to a heterologous polypeptide at the N- or C-terminus or chemically conjugated (including covalently and non-covalently conjugations) to polypeptides or other compositions. For example, antibodies of the present invention may be recombinantly fused or conjugated to molecules useful as labels in detection assays and effector molecules such as heterologous polypeptides, drugs, radionuclides, or toxins. See, e.g., PCT publications WO 92/08495; WO 91/14438; WO 89/12624; U.S. Pat. No. 5,314,995; and EP 396,387.

[1628] The antibodies of the invention include derivatives that are modified, i.e, by the covalent attachment of any type of molecule to the antibody such that covalent attachment does not prevent the antibody from generating an anti-idiotypic response. For example, but not by way of limitation, the antibody derivatives include antibodies that have been modified, e.g., by glycosylation, acetylation, pegylation, phosphylation, amidation, derivatization by known protecting/blocking groups, proteolytic cleavage, linkage to a cellular ligand or other protein, etc. Any of numerous chemical modifications may be carried out by known techniques, including, but not limited to specific chemical cleavage, acetylation, formylation, metabolic synthesis of tunicamycin, etc. Additionally, the derivative may contain one or more non-classical amino acids.

[1629] The antibodies of the present invention may be generated by any suitable method known in the art. Polyclonal antibodies to an antigen-of-interest can be produced by various procedures well known in the art. For example, a polypeptide of the invention can be administered to various host animals including, but not limited to, rabbits, mice, rats, etc. to induce the production of sera containing polyclonal antibodies specific for the antigen. Various adjuvants may be used to increase the immunological response, depending on the host species, and include but are not limited to, Freund's (complete and incomplete), mineral gels such as aluminum hydroxide, surface active substances such as lysolecithin, pluronic polyols, polyanions, peptides, oil emulsions, keyhole limpet hemocyanins, dinitrophenol, and potentially useful human adjuvants such as BCG (bacille Calmette-Guerin) and corynebacterium parvum. Such adjuvants are also well known in the art.

[1630] Monoclonal antibodies can be prepared using a wide variety of techniques known in the art including the use of hybridoma, recombinant, and phage display technologies, or a combination thereof. For example, monoclonal antibodies can be produced using hybridoma techniques including those known in the art and taught, for example, in Harlow et al., Antibodies: A Laboratory Manual, (Cold Spring Harbor Laboratory Press, 2nd ed. 1988); Hammerling, et al., in: Monoclonal Antibodies and T-Cell Hybridomas 563-681 (Elsevier, N.Y., 1981) (said references incorporated by reference in their entireties). The term “monoclonal antibody” as used herein is not limited to antibodies produced through hybridoma technology. The term “monoclonal antibody” refers to an antibody that is derived from a single clone, including any eukaryotic, prokaryotic, or phage clone, and not the method by which it is produced.

[1631] Methods for producing and screening for specific antibodies using hybridoma technology are routine and well known in the art and are discussed in detail in the Examples (e.g., Example 16). In a non-limiting example, mice can be immunized with a polypeptide of the invention or a cell expressing such peptide. Once an immune response is detected, e.g., antibodies specific for the antigen are detected in the mouse serum, the mouse spleen is harvested and splenocytes isolated. The splenocytes are then fused by well known techniques to any suitable myeloma cells, for example cells from cell line SP20 available from the ATCC. Hybridomas are selected and cloned by limited dilution. The hybridoma clones are then assayed by methods known in the art for cells that secrete antibodies capable of binding a polypeptide of the invention. Ascites fluid, which generally contains high levels of antibodies, can be generated by immunizing mice with positive hybridoma clones.

[1632] Accordingly, the present invention provides methods of generating monoclonal antibodies as well as antibodies produced by the method comprising culturing a hybridoma cell secreting an antibody of the invention wherein, preferably, the hybridoma is generated by fusing splenocytes isolated from a mouse immunized with an antigen of the invention with myeloma cells and then screening the bybridomas resulting from the fusion for hybridoma clones that secrete an antibody able to bind a polypeptide of the invention.

[1633] Antibody fragments which recognize specific epitopes may be generated by known techniques. For example, Fab and F(ab)₂ fragments of the invention may be produced by proteolytic cleavage of immunoglobulin molecules, using enzymes such as papain (to produce Fab fragments) or pepsin (to produce F(ab′)2 fragments). F(ab′)2 fragments contain the variable region, the light chain constant region and the CH1 domain of the heavy chain.

[1634] For example, the antibodies of the present invention can also be generated using various phage display methods known in the art. In phage display methods, functional antibody domains are displayed on the surface of phage particles which carry the polynucleotide sequences encoding them. In a particular embodiment, such phage can be utilized to display antigen binding domains expressed from a repertoire or combinatorial antibody library (e.g., human or murine). Phage expressing an antigen binding domain that binds the antigen of interest can be selected or identified with antigen, e.g., using labeled antigen or antigen bound or captured to a solid surface or bead. Phage used in these methods are typically filamentous phage including fd and M13 binding domains expressed from phage with Fab, Fv or disulfide stabilized Fv antibody domains recombinantly fused to either the phage gene III or gene VIII protein. Examples of phage display methods that can be used to make the antibodies of the present invention include those disclosed in Brinkman et al., J. Immunol. Methods 182:41-50 (1995); Ames et al., J. Immunol. Methods 184:177-186 (1995); Kettleborough et al., Eur. J. Immunol. 24:952-958 (1994); Persic et al., Gene 187 9-18 (1997); Burton et al., Advances in immunology 57:191-280 (1994); PCT application No. PCT/GB91/01134; PCT publications WO 90/02809; WO 91/10737; WO 92/01047; WO 92/18619; WO 93/11236; WO 95/15982; WO 95/20401; and U.S. Pat. Nos. 5,698,426; 5,223,409; 5,403,484; 5,580,717; 5,427,908; 5,750,753; 5,821,047; 5,571,698; 5,427,908; 5,516,637; 5,780,225; 5,658,727; 5,733,743 and 5,969,108; each of which is incorporated herein by reference in its entirety.

[1635] As described in the above references, after phage selection, the antibody coding regions from the phage can be isolated and used to generate whole antibodies, including human antibodies, or any other desired antigen binding fragment, and expressed in any desired host, including mammalian cells, insect cells, plant cells, yeast, and bacteria, e.g., as described in detail below. For example, techniques to recombinantly produce Fab, Fab′ and F(ab′)2 fragments can also be employed using methods known in the art such as those disclosed in PCT publication WO 92/22324; Mullinax et al., BioTechniques 12(6):864-869 (1992); and Sawai et al., AJRI 34:26-34 (1995); and Better et al., Science 240:1041-1043 (1988) (said references incorporated by reference in their entireties).

[1636] Examples of techniques which can be used to produce single-chain Fvs and antibodies include those described in U.S. Pat. Nos. 4,946,778 and 5,258,498; Huston et al., Methods in Enzymology 203:46-88 (1991); Shu et al., PNAS 90:7995-7999 (1993); and Skerra et al., Science 240:1038-1040 (1988). For some uses, including in vivo use of antibodies in humans and in vitro detection assays, it may be preferable to use chimeric, humanized, or human antibodies. A chimeric antibody is a molecule in which different portions of the antibody are derived from different animal species, such as antibodies having a variable region derived from a murine monoclonal antibody and a human immunoglobulin constant region. Methods for producing chimeric antibodies are known in the art. See e.g., Morrison, Science 229:1202 (1985); Oi et al., BioTechniques 4:214 (1986); Gillies et al., (1989) J. Immunol. Methods 125:191-202; U.S. Pat. Nos. 5,807,715; 4,816,567; and 4,816,397, which are incorporated herein by reference in their entirety. Humanized antibodies are antibody molecules from non-human species antibody that binds the desired antigen having one or more complementarity determining regions (CDRs) from the non-human species and a framework regions from a human immunoglobulin molecule. Often, framework residues in the human framework regions will be substituted with the corresponding residue from the CDR donor antibody to alter, preferably improve, antigen binding. These framework substitutions are identified by methods well known in the art, e.g., by modeling of the interactions of the CDR and framework residues to identify framework residues important for antigen binding and sequence comparison to identify unusual framework residues at particular positions. (See, e.g., Queen et al., U.S. Pat. No. 5,585,089; Riechmann et al., Nature 332:323 (1988), which are incorporated herein by reference in their entireties.) Antibodies can be humanized using a variety of techniques known in the art including, for example, CDR-grafting (EP 239,400; PCT publication WO 91/09967; U.S. Pat. Nos. 5,225,539; 5,530,101; and 5,585,089), veneering or resurfacing (EP 592,106; EP 519,596; Padlan, Molecular hnmunology 28(4/5):489-498 (1991); Studnicka et al., Protein Engineering 7(6):805-814 (1994); Roguska. et al., PNAS 91:969-973 (1994)), and chain shuffling (U.S. Pat. No. 5,565,332).

[1637] Completely human antibodies are particularly desirable for therapeutic treatment of human patients. Human antibodies can be made by a variety of methods known in the art including phage display methods described above using antibody libraries derived from human immunoglobulin sequences. See also, U.S. Pat. Nos. 4,444,887 and 4,716,111; and PCT publications WO 98/46645, WO 98/50433, WO 98/24893, WO 98/16654, WO 96/34096, WO 96/33735, and WO 91/10741; each of which is incorporated herein by reference in its entirety.

[1638] Human antibodies can also be produced using transgenic mice which are incapable of expressing functional endogenous immunoglobulins, but which can express human immunoglobulin genes. For example, the human heavy and light chain immunoglobulin gene complexes may be introduced randomly or by homologous recombination into mouse embryonic stem cells. Alternatively, the human variable region, constant region, and diversity region may be introduced into mouse embryonic stem cells in addition to the human heavy and light chain genes. The mouse heavy and light chain immunoglobulin genes may be rendered non-functional separately or simultaneously with the introduction of human immunoglobulin loci by homologous recombination. In particular, homozygous deletion of the JH region prevents endogenous antibody production. The modified embryonic stem cells are expanded and microinjected into blastocysts to produce chimeric mice. The chimeric mice are then bred to produce homozygous offspring which express human antibodies. The transgenic mice are immunized in the normal fashion with a selected antigen, e.g., all or a portion of a polypeptide of the invention. Monoclonal antibodies directed against the antigen can be obtained from the immunized, transgenic mice using conventional hybridoma technology. The human immunoglobulin transgenes harbored by the transgenic mice rearrange during B cell differentiation, and subsequently undergo class switching and somatic mutation. Thus, using such a technique, it is possible to produce therapeutically useful IgG, IgA, IgM and IgE antibodies. For an overview of this technology for producing human antibodies, see Lonberg and Huszar, Int. Rev. Immunol. 1:3:65-93 (1995). For a detailed discussion of this technology for producing human antibodies and human monoclonal antibodies and protocols for producing such antibodies, see, e.g., PCT publications WO 98/24893; WO 92/01047; WO 96/34096; WO 96/33735; European Patent No. 0 598 877; U.S. Pat. Nos. 5,413,923; 5,625,126; 5,633,425; 5,569,825; 5,661,016; 5,545,806; 5,814,318; 5,885,793; 5,916,771; and 5,939,598, which are incorporated by reference herein in their entirety. In addition, companies such as Abgenix, Inc. (Freemont, Calif.) and Genpharm (San Jose, Calif.) can be engaged to provide human antibodies directed against a selected antigen using technology similar to that described above.

[1639] Completely human antibodies which recognize a selected epitope can be generated using a technique referred to as “guided selection.” In this approach a selected non-human monoclonal antibody, e.g., a mouse antibody, is used to guide the selection of a completely human antibody recognizing the same epitope. (Jespers et al., Bio/technology 12:899-903 (1988)).

[1640] Further, antibodies to the polypeptides of the invention can, in turn, be utilized to generate anti-idiotype antibodies that “mimic” polypeptides of the invention using techniques well known to those skilled in the art. (See, e.g., Greenspan & Bona, FASEB J. 7(5):437-444; (1989) and Nissinoff, J. Immunol. 147(8):2429-2438 (1991)). For example, antibodies which bind to and competitively inhibit polypeptide multimerization and/or binding of a polypeptide of the invention to a ligand can be used to generate anti-idiotypes that “mimic” the polypeptide multimerization and/or binding domain and, as a consequence, bind to and neutralize polypeptide and/or its ligand. Such neutralizing anti-idiotypes or Fab fragments of such anti-idiotypes can be used in therapeutic regimens to neutralize polypeptide ligand. For example, such anti-idiotypic antibodies can be used to bind a polypeptide of the invention and/or to bind its ligands/receptors, and thereby block its biological activity.

[1641] Polynucleotides Encoding Antibodies

[1642] The invention further provides polynucleotides comprising a nucleotide sequence encoding an antibody of the invention and fragments thereof. The invention also encompasses polynucleotides that hybridize under stringent or lower stringency hybridization conditions, e.g., as defined supra, to polynucleotides that encode an antibody, preferably, that specifically binds to a polypeptide of the invention, preferably, an antibody that binds to a polypeptide having the amino acid sequence of SEQ ID NO:Y.

[1643] The polynucleotides may be obtained, and the nucleotide sequence of the polynucleotides determined, by any method known in the art. For example, if the nucleotide sequence of the antibody is known, a polynucleotide encoding the antibody may be assembled from chemically synthesized oligonucleotides (e.g., as described in Kutmeier et al., BioTechniques 17:242 (1994)), which, briefly, involves the synthesis of overlapping oligonucleotides containing portions of the sequence encoding the antibody, annealing and ligating of those oligonucleotides, and then amplification of the ligated oligonucleotides by PCR.

[1644] Alternatively, a polynucleotide encoding an antibody may be generated from nucleic acid from a suitable source. If a clone containing a nucleic acid encoding a particular antibody is not available, but the sequence of the antibody molecule is known, a nucleic acid encoding the immunoglobulin may be chemically synthesized or obtained from a suitable source (e.g., an antibody cDNA library, or a cDNA library generated from, or nucleic acid, preferably poly A+ RNA, isolated from, any tissue or cells expressing the antibody, such as hybridoma cells selected to express an antibody of the invention) by PCR amplification using synthetic primers hybridizable to the 3′ and 5′ ends of the sequence or by cloning using an oligonucleotide probe specific for the particular gene sequence to identify, e.g., a cDNA clone from a cDNA library that encodes the antibody. Amplified nucleic acids generated by PCR may then be cloned into replicable cloning vectors using any method well known in the art.

[1645] Once the nucleotide sequence and corresponding amino acid sequence of the antibody is determined, the nucleotide sequence of the antibody may be manipulated using methods well known in the art for the manipulation of nucleotide sequences, e.g., recombinant DNA techniques, site directed mutagenesis, PCR, etc. (see, for example, the techniques described in Sambrook et al., 1990, Molecular Cloning, A Laboratory Manual, 2d Ed., Cold Spring Harbor Laboratory, Cold Spring Harbor, N.Y. and Ausubel et al., eds., 1998, Current Protocols in Molecular Biology, John Wiley & Sons, NY, which are both incorporated by reference herein in their entireties), to generate antibodies having a different amino acid sequence, for example to create amino acid substitutions, deletions, and/or insertions.

[1646] In a specific embodiment, the amino acid sequence of the heavy and/or light chain variable domains may be inspected to identify the sequences of the complementarity determining regions (CDRs) by methods that are well know in the art, e.g., by comparison to known amino acid sequences of other heavy and light chain variable regions to determine the regions of sequence hypervariability. Using routine recombinant DNA techniques, one or more of the CDRs may be inserted within framework regions, e.g., into human framework regions to humanize a non-human antibody, as described supra. The framework regions may be naturally occurring or consensus framework regions, and preferably human framework regions (see, e.g., Chothia et al., J. Mol. Biol. 278: 457-479 (1998) for a listing of human framework regions). Preferably, the polynucleotide generated by the combination of the framework regions and CDRs encodes an antibody that specifically binds a polypeptide of the invention. Preferably, as discussed supra, one or more amino acid substitutions may be made within the framework regions, and, preferably, the amino acid substitutions improve binding of the antibody to its antigen. Additionally, such methods may be used to make amino acid substitutions or deletions of one or more variable region cysteine residues participating in an intrachain disulfide bond to generate antibody molecules lacking one or more intrachain disulfide bonds. Other alterations to the polynucleotide are encompassed by the present invention and within the skill of the art.

[1647] In addition, techniques developed for the production of “chimeric antibodies” (Morrison et al., Proc. Natl. Acad. Sci. 81:851-855 (1984); Neuberger et al., Nature 312:604-608 (1984); Takeda et al., Nature 314:452-454 (1985)) by splicing genes from a mouse antibody molecule of appropriate antigen specificity together with genes from a human antibody molecule of appropriate biological activity can be used. As described supra, a chimeric antibody is a molecule in which different portions are derived from different animal species, such as those having a variable region derived from a murine mAb and a human immunoglobulin constant region, e.g., humanized antibodies.

[1648] Alternatively, techniques described for the production of single chain antibodies (U.S. Pat. No. 4,946,778; Bird, Science 242:423-42 (1988); Huston et al., Proc. Natl. Acad. Sci. USA 85:5879-5883 (1988); and Ward et al., Nature 334:544-54 (1989)) can be adapted to produce single chain antibodies. Single chain antibodies are formed by linking the heavy and light chain fragments of the Fv region via an amino acid bridge, resulting in a single chain polypeptide. Techniques for the assembly of functional Fv fragments in E. coli may also be used (Skerra et al., Science 242:1038-1041 (1988)).

[1649] Methods of producing Antibodies

[1650] The antibodies of the invention can be produced by any method known in the art for the synthesis of antibodies, in particular, by chemical synthesis or preferably, by recombinant expression techniques.

[1651] Recombinant expression of an antibody of the invention, or fragment, derivative or analog thereof, (e.g., a heavy or light chain of an antibody of the invention or a single chain antibody of the invention), requires construction of an expression vector containing a polynucleotide that encodes the antibody. Once a polynucleotide encoding an antibody molecule or a heavy or light chain of an antibody, or portion thereof (preferably containing the heavy or light chain variable domain), of the invention has been obtained, the vector for the production of the antibody molecule may be produced by recombinant DNA technology using techniques well known in the art. Thus, methods for preparing a protein by expressing a polynucleotide containing an antibody encoding nucleotide sequence are described herein. Methods which are well known to those skilled in the art can be used to construct expression vectors containing antibody coding sequences and appropriate transcriptional and translational control signals. These methods include, for example, in vitro recombinant DNA techniques, synthetic techniques, and in vivo genetic recombination. The invention, thus, provides replicable vectors comprising a nucleotide sequence encoding an antibody molecule of the invention, or a heavy or light chain thereof, or a heavy or light chain variable domain, operably linked to a promoter. Such vectors may include the nucleotide sequence encoding the constant region of the antibody molecule (see, e.g., PCT Publication WO 86/05807; PCT Publication WO 89/01036; and U.S. Pat. No. 5,122,464) and the variable domain of the antibody may be cloned into such a vector for expression of the entire heavy or light chain.

[1652] The expression vector is transferred to a host cell by conventional techniques and the transfected cells are then cultured by conventional techniques to produce an antibody of the invention. Thus, the invention includes host cells containing a polynucleotide encoding an antibody of the invention, or a heavy or light chain thereof, or a single chain antibody of the invention, operably linked to a heterologous promoter. In preferred embodiments for the expression of double-chained antibodies, vectors encoding both the heavy and light chains may be co-expressed in the host cell for expression of the entire immunoglobulin molecule, as detailed below.

[1653] A variety of host-expression vector systems may be utilized to express the antibody molecules of the invention. Such host-expression systems represent vehicles by which the coding sequences of interest may be produced and subsequently purified, but also represent cells which may, when transformed or transfected with the appropriate nucleotide coding sequences, express an antibody molecule of the invention in situ. These include but are not limited to microorganisms such as bacteria (e.g., E. coli, B. subtilis) transformed with recombinant bacteriophage DNA, plasmid DNA or cosmid DNA expression vectors containing antibody coding sequences; yeast (e.g., Saccharomyces, Pichia) transformed with recombinant yeast expression vectors containing antibody coding sequences; insect cell systems infected with recombinant virus expression vectors (e.g., baculovirus) containing antibody coding sequences; plant cell systems infected with recombinant virus expression vectors (e.g., cauliflower mosaic virus, CaMV; tobacco mosaic virus, TMV) or transformed with recombinant plasmid expression vectors (e.g., Ti plasmid) containing antibody coding sequences; or mammalian cell systems (e.g., COS, CHO, BHK, 293, 3T3 cells) harboring recombinant expression constructs containing promoters derived from the genome of mammalian cells (e.g., metallothionein promoter) or from mammalian viruses (e.g., the adenovirus late promoter; the vaccinia virus 7.5K promoter). Preferably, bacterial cells such as Escherichia coli, and more preferably, eukaryotic cells, especially for the expression of whole recombinant antibody molecule, are used for the expression of a recombinant antibody molecule. For example, mammalian cells such as Chinese hamster ovary cells (CHO), in conjunction with a vector such as the major intermediate early gene promoter element from human cytomegalovirus is an effective expression system for antibodies (Foecking et al., Gene 45:101 (1986); Cockett et al., Bio/Technology 8:2 (1990)).

[1654] In bacterial systems, a number of expression vectors may be advantageously selected depending upon the use intended for the antibody molecule being expressed. For example, when a large quantity of such a protein is to be produced, for the generation of pharmaceutical compositions of an antibody molecule, vectors which direct the expression of high levels of fusion protein products that are readily purified may be desirable. Such vectors include, but are not limited, to the E. coli expression vector pUR278 (Ruther et al., EMBO J. 2:1791 (1983)), in which the antibody coding sequence may be ligated individually into the vector in frame with the lac Z coding region so that a fusion protein is produced; pIN vectors (Inouye & Inouye, Nucleic Acids Res. 13:3101-3109 (1985); Van Heeke & Schuster, J. Biol. Chem. 24:5503-5509 (1989)); and the like. pGEX vectors may also be used to express foreign polypeptides as fusion proteins with glutathione S-transferase (GST). In general, such fusion proteins are soluble and can easily be purified from lysed cells by adsorption and binding to matrix glutathione-agarose beads followed by elution in the presence of free glutathione. The pGEX vectors are designed to include thrombin or factor Xa protease cleavage sites so that the cloned target gene product can be released from the GST moiety.

[1655] In an insect system, Autographa californica nuclear polyhedrosis virus (ACNPV) is used as a vector to express foreign genes. The virus grows in Spodoptera frugiperda cells. The antibody coding sequence may be cloned individually into non-essential regions (for example the polyhedrin gene) of the virus and placed under control of an AcNPV promoter (for example the polyhedrin promoter).

[1656] In mammalian host cells, a number of viral-based expression systems may be utilized. In cases where an adenovirus is used as an expression vector, the antibody coding sequence of interest may be ligated to an adenovirus transcription/translation control complex, e.g., the late promoter and tripartite leader sequence. This chimeric gene may then be inserted in the adenovirus genome by in vitro or in vivo recombination. Insertion in a non-essential region of the viral genome (e.g., region E1 or E3) will result in a recombinant virus that is viable and capable of expressing the antibody molecule in infected hosts. (e.g., see Logan & Shenk, Proc. Natl. Acad. Sci. USA 81:355-359 (1984)). Specific initiation signals may also be required for efficient translation of inserted antibody coding sequences. These signals include the ATG initiation codon and adjacent sequences. Furthermore, the initiation codon must be in phase with the reading frame of the desired coding sequence to ensure translation of the entire insert. These exogenous translational control signals and initiation codons can be of a variety of origins, both natural and synthetic. The efficiency of expression may be enhanced by the inclusion of appropriate transcription enhancer elements, transcription terminators, etc. (see Bittner et al., Methods in Enzymol. 153:51-544 (1987)).

[1657] In addition, a host cell strain may be chosen which modulates the expression of the inserted sequences, or modifies and processes the gene product in the specific fashion desired. Such modifications (e.g., glycosylation) and processing (e.g., cleavage) of protein products may be important for the function of the protein. Different host cells have characteristic and specific mechanisms for the post-translational processing and modification of proteins and gene products. Appropriate cell lines or host systems can be chosen to ensure the correct modification and processing of the foreign protein expressed. To this end, eukaryotic host cells which possess the cellular machinery for proper processing of the primary transcript, glycosylation, and phosphorylation of the gene product may be used. Such mammalian host cells include but are not limited to CHO, VERY, BHK, Hela, COS, MDCK, 293, 3T3, W138, and in particular, breast cancer cell lines such as, for example, BT483, Hs578T, HTB2, BT20 and T47D, and normal mammary gland cell line such as, for example, CRL7030 and Hs578Bst.

[1658] For long-term, high-yield production of recombinant proteins, stable expression is preferred. For example, cell lines which stably express the antibody molecule may be engineered. Rather than using expression vectors which contain viral origins of replication, host cells can be transformed with DNA controlled by appropriate expression control elements (e.g., promoter, enhancer, sequences, transcription terminators, polyadenylation sites, etc.), and a selectable marker. Following the introduction of the foreign DNA, engineered cells may be allowed to grow for 1-2 days in an enriched media, and then are switched to a selective media. The selectable marker in the recombinant plasmid confers resistance to the selection and allows cells to stably integrate the plasmid into their chromosomes and grow to form foci which in turn can be cloned and expanded into cell lines. This method may advantageously be used to engineer cell lines which express the antibody molecule. Such engineered cell lines may be particularly useful in screening and evaluation of compounds that interact directly or indirectly with the antibody molecule.

[1659] A number of selection systems may be used, including but not limited to the herpes simplex virus thyrnidine kinase (Wigler et al., Cell 11:223 (1977)), hypoxanthine-guanine phosphoribosyltransferase (Szybalska & Szybalski, Proc. Natl. Acad. Sci. USA 48:202 (1992)), and adenine phosphoribosyltransferase (Lowy et al., Cell 22:817 (1980)) genes can be employed in tk-, hgprt- or aprt-cells, respectively. Also, antimetabolite resistance can be used as the basis of selection for the following genes: dhfr, which confers resistance to methotrexate (Wigler et al., Natl. Acad. Sci. USA 77:357 (1980); O'Hare et al., Proc. Natl. Acad. Sci. USA 78:1527 (1981)); gpt, which confers resistance to mycophenolic acid (Mulligan & Berg, Proc. Natl. Acad. Sci. USA 78:2072 (1981)); neo, which confers resistance to the aminoglycoside G-418 Clinical Pharmacy 12:488-505; Wu and Wu, Biotherapy 3:87-95 (1991); Tolstoshev, Ann. Rev. Pharmacol. Toxicol. 32:573-596 (1993); Mulligan, Science 260:926-932 (1993); and Morgan and Anderson, Ann. Rev. Biochem. 62:191-217 (1993); May, 1993, TIB TECH 11 (5):155-215); and hygro, which confers resistance to hygromycin (Santerre et al., Gene 30:147 (1984)). Methods commonly known in the art of recombinant DNA technology may be routinely applied to select the desired recombinant clone, and such methods are described, for example, in Ausubel et al. (eds.), Current Protocols in Molecular Biology, John Wiley & Sons, NY (1993); Kriegler, Gene Transfer and Expression, A Laboratory Manual, Stockton Press, NY (1990); and in Chapters 12 and 13, Dracopoli et al. (eds), Current Protocols in Human Genetics, John Wiley & Sons, NY (1994); Colberre-Garapin et al., J. Mol. Biol. 150:1 (1981), which are incorporated by reference herein in their entireties.

[1660] The expression levels of an antibody molecule can be increased by vector amplification (for a review, see Bebbington and Hentschel, The use of vectors based on gene amplification for the expression of cloned genes in mammalian cells in DNA cloning, Vol.3. (Academic Press, New York, 1987)). When a marker in the vector system expressing antibody is amplifiable, increase in the level of inhibitor present in culture of host cell will increase the number of copies of the marker gene. Since the amplified region is associated with the antibody gene, production of the antibody will also increase (Crouse et al., Mol. Cell. Biol. 3:257 (1983)).

[1661] The host cell may be co-transfected with two expression vectors of the invention, the first vector encoding a heavy chain derived polypeptide and the second vector encoding a light chain derived polypeptide. The two vectors may contain identical selectable markers which enable equal expression of heavy and light chain polypeptides. Alternatively, a single vector may be used which encodes, and is capable of expressing, both heavy and light chain polypeptides. In such situations, the light chain should be placed before the heavy chain to avoid an excess of toxic free heavy chain (Proudfoot, Nature 322:52 (1986); Kohler, Proc. Natl. Acad. Sci. USA 77:2197 (1980)). The coding sequences for the heavy and light chains may comprise cDNA or genomic DNA.

[1662] Once an antibody molecule of the invention has been produced by an animal, chemically synthesized, or recombinantly expressed, it may be purified by any method known in the art for purification of an immunoglobulin molecule, for example, by chromatography (e.g., ion exchange, affinity, particularly by affinity for the specific antigen after Protein A, and sizing column chromatography), centrifugation, differential solubility, or by any other standard technique for the purification of proteins. In addition, the antibodies of the present invention or fragments thereof can be fused to heterologous polypeptide sequences described herein or otherwise known in the art, to facilitate purification.

[1663] The present invention encompasses antibodies recombinantly fused or chemically conjugated (including both covalently and non-covalently conjugations) to a polypeptide (or portion thereof, preferably at least 10, 20, 30, 40, 50, 60, 70, 80, 90 or 100 amino acids of the polypeptide) of the present invention to generate fusion proteins. The fusion does not necessarily need to be direct, but may occur through linker sequences. The antibodies may be specific for antigens other than polypeptides (or portion thereof, preferably at least 10, 20, 30, 40, 50, 60, 70, 80, 90 or 100 amino acids of the polypeptide) of the present invention. For example, antibodies may be used to target the polypeptides of the present invention to particular cell types, either in vitro or in vivo, by fusing or conjugating the polypeptides of the present invention to antibodies specific for particular cell surface receptors. Antibodies fused or conjugated to the polypeptides of the present invention may also be used in in vitro immunoassays and purification methods using methods known in the art. See e.g., Harbor et al., supra, and PCT publication WO 93/21232; EP 439,095; Naramura et al., Immunol. Lett. 39:91-99 (1994); U.S. Pat. No. 5,474,981; Gillies et al., PNAS 89:1428-1432 (1992); Fell et al., J. Immunol. 146:2446-2452(1991), which are incorporated by reference in their entireties.

[1664] The present invention further includes compositions comprising the polypeptides of the present invention fused or conjugated to antibody domains other than the variable regions. For example, the polypeptides of the present invention may be fused or conjugated to an antibody Fc region, or portion thereof. The antibody portion fused to a polypeptide of the present invention may comprise the constant region, hinge region, CH1 domain, CH2 domain, and CH3 domain or any combination of whole domains or portions thereof. The polypeptides may also be fused or conjugated to the above antibody portions to form multimers. For example, Fc portions fused to the polypeptides of the present invention can form dimers through disulfide bonding between the Fc portions. Higher multimeric forms can be made by fusing the polypeptides to portions of IgA and IgM. Methods for fusing or conjugating the polypeptides of the present invention to antibody portions are known in the art. See, e.g., U.S. Pat. Nos. 5,336,603; 5,622,929; 5,359,046; 5,349,053; 5,447,851; 5,112,946; EP 307,434; EP 367,166; PCT publications WO 96/04388; WO 91/06570; Ashkenazi et al., Proc. Natl. Acad. Sci. USA 88:10535-10539 (1991); Zheng et al., J. Immunol. 154:5590-5600 (1995); and Vil et al., Proc. Natl. Acad. Sci. USA 89:11337-11341(1992) (said references incorporated by reference in their entireties).

[1665] As discussed, supra, the polypeptides corresponding to a polypeptide, polypeptide fragment, or a variant of SEQ ID NO:Y may be fused or conjugated to the above antibody portions to increase the in vivo half life of the polypeptides or for use in immunoassays using methods known in the art. Further, the polypeptides corresponding to SEQ ID NO:Y may be fused or conjugated to the above antibody portions to facilitate purification. One reported example describes chimeric proteins consisting of the first two domains of the human CD4-polypeptide and various domains of the constant regions of the heavy or light chains of mammalian immunoglobulins. (EP 394,827; Traunecker et al., Nature 331:84-86 (1988). The polypeptides of the present invention fused or conjugated to an antibody having disulfide-linked dimeric structures (due to the IgG) may also be more efficient in binding and neutralizing other molecules, than the monomeric secreted protein or protein fragment alone. (Fountoulakis et al., J. Biochem. 270:3958-3964 (1995)). In many cases, the Fc part in a fusion protein is beneficial in therapy and diagnosis, and thus can result in, for example, improved pharmacokinetic properties. (EP A 232,262). Alternatively, deleting the Fc part after the fusion protein has been expressed, detected, and purified, would be desired. For example, the Fc portion may hinder therapy and diagnosis if the fusion protein is used as an antigen for immunizations. In drug discovery, for example, human proteins, such as h1L-5, have been fused with Fc portions for the purpose of high-throughput screening assays to identify antagonists of hIL-5. (See, Bennett et al., J. Molecular Recognition 8:52-58 (1995); Johanson et al., J. Biol. Chem. 270:9459-9471 (1995).

[1666] Moreover, the antibodies or fragments thereof of the present invention can be fused to marker sequences, such as a peptide to facilitate purification. In preferred embodiments, the marker amino acid sequence is a hexa-histidine peptide, such as the tag provided in a pQE vector (QIAGEN, Inc., 9259 Eton Avenue, Chatsworth, Calif., 91311), among others, many of which are commercially available. As described in Gentz et al., Proc. Natl. Acad. Sci. USA 86:821-824 (1989), for instance, hexa-histidine provides for convenient purification of the fusion protein. Other peptide tags useful for purification include, but are not limited to, the “HA” tag, which corresponds to an epitope derived from the influenza hemagglutinin protein (Wilson et al., Cell 37:767 (1984)) and the “flag” tag.

[1667] The present invention further encompasses antibodies or fragments thereof conjugated to a diagnostic or therapeutic agent. The antibodies can be used diagnostically to, for example, monitor the development or progression of a tumor as part of a clinical testing procedure to, e.g., determine the efficacy of a given treatment regimen. Detection can be facilitated by coupling the antibody to a detectable substance. Examples of detectable substances include various enzymes, prosthetic groups, fluorescent materials, luminescent materials, bioluminescent materials, radioactive materials, positron emitting metals using various positron emission tomographies, and nonradioactive paramagnetic metal ions. The detectable substance may be coupled or conjugated either directly to the antibody (or fragment thereof) or indirectly, through an intermediate (such as, for example, a linker known in the art) using techniques known in the art. See, for example, U.S. Pat. No. 4,741,900 for metal ions which can be conjugated to antibodies for use as diagnostics according to the present invention. Examples of suitable enzymes include horseradish peroxidase, alkaline phosphatase, beta-galactosidase, or acetylcholinesterase; examples of suitable prosthetic group complexes include streptavidin/biotin and avidin/biotin; examples of suitable fluorescent materials include umbelliferone, fluorescein, fluorescein isothiocyanate, rhodamine, dichlorotriazinylamine fluorescein, dansyl chloride or phycoerythrin; an example of a luminescent material includes luminol; examples of bioluminescent materials include luciferase, luciferin, and aequorin; and examples of suitable radioactive material include 125I, 131I, 111In or 99Tc.

[1668] Further, an antibody or fragment thereof may be conjugated to a therapeutic moiety such as a cytotoxin, e.g., a cytostatic or cytocidal agent, a therapeutic agent or a radioactive metal ion, e.g., alpha-emitters such as, for example, 213Bi. A cytotoxin or cytotoxic agent includes any agent that is detrimental to cells. Examples include paclitaxol, cytochalasin B, gramicidin D, ethidium bromide, emetine, mitomycin, etoposide, tenoposide, vincristine, vinblastine, colchicin, doxorubicin, daunorubicin, dihydroxy anthracin dione, mitoxantrone, mithramycin, actinomycin D, 1-dehydrotestosterone, glucocorticoids, procaine, tetracaine, lidocaine, propranolol, and puromycin and analogs or homologs thereof. Therapeutic agents include, but are not limited to, antimetabolites (e.g., methotrexate, 6-mercaptopurine, 6-thioguanine, cytarabine, 5-fluorouracil decarbazine), alkylating agents (e.g., mechlorethamine, thioepa chlorambucil, melphalan, carmustine (BSNU) and lomustine (CCNU), cyclothosphamide, busulfan, dibromomannitol, streptozotocin, mitomycin C, and cis-dichlorodiamine platinum (II) (DDP) cisplatin), anthracyclines (e.g., daunorubicin (formerly daunomycin) and doxorubicin), antibiotics (e.g., dactinomycin (formerly actinomycin), bleomycin, mithramycin, and anthramycin (AMC)), and anti-mitotic agents (e.g., vincristine and vinblastine).

[1669] The conjugates of the invention can be used for modifying a given biological response, the therapeutic agent or drug moiety is not to be construed as limited to classical chemical therapeutic agents. For example, the drug moiety may be a protein or polypeptide possessing a desired biological activity. Such proteins may include, for example, a toxin such as abrin, ricin A, pseudomonas exotoxin, or diphtheria toxin; a protein such as tumor necrosis factor, a-interferon, 13-interferon, nerve growth factor, platelet derived growth factor, tissue plasminogen activator, an apoptotic agent, e.g., TNF-alpha, TNF-beta, AIM I (See, International Publication No. WO 97/33899), AIM II (See, International Publication No. WO 97/34911), Fas Ligand (Takahashi et al., Int. Immunol., 6:1567-1574 (1994)), VEGI (See, International Publication No. WO 99/23105), a thrombotic agent or an anti-angiogenic agent, e.g., angiostatin or endostatin; or, biological response modifiers such as, for example, lymphokines, interleukin-1 (“IL-1”), interleukin-2 (“IL-2”), interleukin-6 (“IL-6”), granulocyte macrophage colony stimulating factor (“GM-CSF”), granulocyte colony stimulating factor (“G-CSF”), or other growth factors.

[1670] Antibodies may also be attached to solid supports, which are particularly useful for immunoassays or purification of the target antigen. Such solid supports include, but are not limited to, glass, cellulose, polyacrylamide, nylon, polystyrene, polyvinyl chloride or polypropylene.

[1671] Techniques for conjugating such therapeutic moiety to antibodies are well known, see, e.g., Arnon et al., “Monoclonal Antibodies For Immunotargeting Of Drugs In Cancer Therapy”, in Monoclonal Antibodies And Cancer Therapy, Reisfeld et al. (eds.), pp. 243-56 (Alan R. Liss, Inc. 1985); Hellstrom et al., “Antibodies For Drug Delivery”, in Controlled Drug Delivery (2nd Ed.), Robinson et al. (eds.), pp. 623-53 (Marcel Dekker, Inc. 1987); Thorpe, “Antibody Carriers Of Cytotoxic Agents In Cancer Therapy: A Review”, in Monoclonal Antibodies '84: Biological And Clinical Applications, Pinchera et al. (eds.), pp. 475-506 (1985); “Analysis, Results, And Future Prospective Of The Therapeutic Use Of Radiolabeled Antibody In Cancer Therapy”, in Monoclonal Antibodies For Cancer Detection And Therapy, Baldwin et al. (eds.), pp. 303-16 (Academic Press 1985), and Thorpe et al., “The Preparation And Cytotoxic Properties Of Antibody-Toxin Conjugates”, Immunol. Rev. 62:119-58 (1982).

[1672] Alternatively, an antibody can be conjugated to a second antibody to form an antibody heteroconjugate as described by Segal in U.S. Pat. No. 4,676,980, which is incorporated herein by reference in its entirety.

[1673] An antibody, with or without a therapeutic moiety conjugated to it, administered alone or in combination with cytotoxic factor(s) and/or cytokine(s) can be used as a therapeutic.

[1674] Immunophenotyping

[1675] The antibodies of the invention may be utilized for immunophenotyping of cell lines and biological samples. The translation product of the gene of the present invention may be useful as a cell specific marker, or more specifically as a cellular marker that is differentially expressed at various stages of differentiation and/or maturation of particular cell types. Monoclonal antibodies directed against a specific epitope, or combination of epitopes, will allow for the screening of cellular populations expressing the marker. Various techniques can be utilized using monoclonal antibodies to screen for cellular populations expressing the marker(s), and include magnetic separation using antibody-coated magnetic beads, “panning” with antibody attached to a solid matrix (i.e., plate), and flow cytometry (See, e.g., U.S. Pat. No. 5,985,660; and Morrison et al., Cell, 96:737-49 (1999)).

[1676] These techniques allow for the screening of particular populations of cells, such as might be found with hematological malignancies (i.e. minimal residual disease (MRD) in acute leukemic patients) and “non-self” cells in transplantations to prevent Graft-versus-Host Disease (GVHD). Alternatively, these techniques allow for the screening of hematopoietic stem and progenitor cells capable of undergoing proliferation and/or differentiation, as might be found in human umbilical cord blood.

[1677] Assays for Antibody Binding

[1678] The antibodies of the invention may be assayed for immunospecific binding by any method known in the art. The immunoassays which can be used include but are not limited to competitive and non-competitive assay systems using techniques such as western blots, radioimmunoassays, ELISA (enzyme linked immunosorbent assay), “sandwich” immunoassays, immunoprecipitation assays, precipitin reactions, gel diffusion precipitin reactions, immunodiffusion assays, agglutination assays, complement-fixation assays, immunoradiometric assays, fluorescent immunoassays, protein A immunoassays, to name but a few. Such assays are routine and well known in the art (see, e.g., Ausubel et al, eds, 1994, Current Protocols in Molecular Biology, Vol. 1, John Wiley & Sons, Inc., New York, which is incorporated by reference herein in its entirety). Exemplary immunoassays are described briefly below (but are not intended by way of limitation).

[1679] Immunoprecipitation protocols generally comprise lysing a population of cells in a lysis buffer such as RIPA buffer (1% NP-40 or Triton X-100, 1% sodium deoxycholate, 0.1% SDS, 0.15 M NaCl, 0.01 M sodium phosphate at pH 7.2, 1% Trasylol) supplemented with protein phosphatase and/or protease inhibitors (e.g., EDTA, PMSF, aprotinin, sodium vanadate), adding the antibody of interest to the cell lysate, incubating for a period of time (e.g., 1-4 hours) at 4° C., adding protein A and/or protein G sepharose beads to the cell lysate, incubating for about an hour or more at 4° C., washing the beads in lysis buffer and resuspending the beads in SDS/sample buffer. The ability of the antibody of interest to immunoprecipitate a particular antigen can be assessed by, e.g., western blot analysis. One of skill in the art would be knowledgeable as to the parameters that can be modified to increase the binding of the antibody to an antigen and decrease the background (e.g., pre-clearing the cell lysate with sepharose beads). For further discussion regarding immunoprecipitation protocols see, e.g., Ausubel et al, eds, 1994, Current Protocols in Molecular Biology, Vol. 1, John Wiley & Sons, Inc., New York at 10.16.1.

[1680] Western blot analysis generally comprises preparing protein samples, electrophoresis of the protein samples in a polyacrylamide gel (e.g., 8%-20% SDS-PAGE depending on the molecular weight of the antigen), transferring the protein sample from the polyacrylamide gel to a membrane such as nitrocellulose, PVDF or nylon, blocking the membrane in blocking solution (e.g., PBS with 3% BSA or non-fat milk), washing the membrane in washing buffer (e.g., PBS-Tween 20), blocking the membrane with primary antibody (the antibody of interest) diluted in blocking buffer, washing the membrane in washing buffer, blocking the membrane with a secondary antibody (which recognizes the primary antibody, e.g., an anti-human antibody) conjugated to an enzymatic substrate (e.g., horseradish peroxidase or alkaline phosphatase) or radioactive molecule (e.g., 32P or 125I) diluted in blocking buffer, washing the membrane in wash buffer, and detecting the presence of the antigen. One of skill in the art would be knowledgeable as to the parameters that can be modified to increase the signal detected and to reduce the background noise. For further discussion regarding western blot protocols see, e.g., Ausubel et al, eds, 1994, Current Protocols in Molecular Biology, Vol. 1, John Wiley & Sons, Inc., New York at 10.8.1.

[1681] ELISAs comprise preparing antigen, coating the well of a 96 well microtiter plate with the antigen, adding the antibody of interest conjugated to a detectable compound such as an enzymatic substrate (e.g., horseradish peroxidase or alkaline phosphatase) to the well and incubating for a period of time, and detecting the presence of the antigen. In ELISAs the antibody of interest does not have to be conjugated to a detectable compound; instead, a second antibody (which recognizes the antibody of interest) conjugated to a detectable compound may be added to the well. Further, instead of coating the well with the antigen, the antibody may be coated to the well. In this case, a second antibody conjugated to a detectable compound may be added following the addition of the antigen of interest to the coated well. One of skill in the art would be knowledgeable as to the parameters that can be modified to increase the signal detected as well as other variations of ELISAs known in the art. For further discussion regarding ELISAs see, e.g., Ausubel et al, eds, 1994, Current Protocols in Molecular Biology, Vol. 1, John Wiley & Sons, Inc., New York at 11.2.1.

[1682] The binding affinity of an antibody to an antigen and the off-rate of an antibody-antigen interaction can be determined by competitive binding assays. One example of a competitive binding assay is a radioimmunoassay comprising the incubation of labeled antigen (e.g., 3H or 125I) with the antibody of interest in the presence of increasing amounts of unlabeled antigen, and the detection of the antibody bound to the labeled antigen. The affinity of the antibody of interest for a particular antigen and the binding off-rates can be determined from the data by scatchard plot analysis. Competition with a second antibody can also be determined using radioimmunoassays. In this case, the antigen is incubated with antibody of interest conjugated to a labeled compound (e.g., 3H or 125I) in the presence of increasing amounts of an unlabeled second antibody.

[1683] Therapeutic uses

[1684] The present invention is further directed to antibody-based therapies which involve administering antibodies of the invention to an animal, preferably a mammal, and most preferably a human, patient for treating one or more of the disclosed diseases, disorders, or conditions. Therapeutic compounds of the invention include, but are not limited to, antibodies of the invention (including fragments, analogs and derivatives thereof as described herein) and nucleic acids encoding antibodies of the invention (including fragments, analogs and derivatives thereof and anti-idiotypic antibodies as described herein). The antibodies of the invention can be used to treat, inhibit or prevent diseases, disorders or conditions associated with aberrant expression and/or activity of a polypeptide of the invention, including, but not limited to, any one or more of the diseases, disorders, or conditions described herein. The treatment and/or prevention of diseases, disorders, or conditions associated with aberrant expression and/or activity of a polypeptide of the invention includes, but is not limited to, alleviating symptoms associated with those diseases, disorders or conditions. Antibodies of the invention may be provided in pharmaceutically acceptable compositions as known in the art or as described herein.

[1685] A summary of the ways in which the antibodies of the present invention may be used therapeutically includes binding polynucleotides or polypeptides of the present invention locally or systemically in the body or by direct cytotoxicity of the antibody, e.g. as mediated by complement (CDC) or by effector cells (ADCC). Some of these approaches are described in more detail below. Armed with the teachings provided herein, one of ordinary skill in the art will know how to use the antibodies of the present invention for diagnostic, monitoring or therapeutic purposes without undue experimentation.

[1686] The antibodies of this invention may be advantageously utilized in combination with other monoclonal or chimeric antibodies, or with lymphokines or hematopoietic growth factors (such as, e.g., IL-2, IL-3 and IL-7), for example, which serve to increase the number or activity of effector cells which interact with the antibodies.

[1687] The antibodies of the invention may be administered alone or in combination with other types of treatments (e.g., radiation therapy, chemotherapy, hormonal therapy, immunotherapy and anti-tumor agents). Generally, administration of products of a species origin or species reactivity (in the case of antibodies) that is the same species as that of the patient is preferred. Thus, in a preferred embodiment, human antibodies, fragments derivatives, analogs, or nucleic acids, are administered to a human patient for therapy or prophylaxis.

[1688] It is preferred to use high affinity and/or potent in vivo inhibiting and/or neutralizing antibodies against polypeptides or polynucleotides of the present invention, fragments or regions thereof, for both immunoassays directed to and therapy of disorders related to polynucleotides or polypeptides, including fragments thereof, of the present invention. Such antibodies, fragments, or regions, will preferably have an affinity for polynucleotides or polypeptides of the invention, including fragments thereof. Preferred binding affinities include those with a dissociation constant or Kd less than 5×10⁻² M, 10⁻² M, 5×10⁻³ M, 10⁻³ M, 5×10⁻⁴ M, 10⁻⁴ M, 5×10⁻⁵ M, 10⁻⁵ M, 5×10⁻⁶ M, 10⁻⁶ M, 5×10⁻⁷ M, 10⁻⁷ M, 5×10⁻⁸ M, 10⁻⁸ M, 5×10⁻⁹ M, 10⁻⁹ M, 5×10⁻¹⁰ M, 10⁻¹⁰ M, 5×10⁻¹¹ M, 10⁻¹² M, 5×10⁻¹² M, 10⁻¹² M, 5×10⁻¹³ M, 10⁻¹³ M, 5×10⁻¹⁴ M, 10⁻¹⁴ M, 5×10⁻¹⁵ M, and 10⁻¹⁵ M.

[1689] Gene Therapy

[1690] In a specific embodiment, nucleic acids comprising sequences encoding antibodies or functional derivatives thereof, are administered to treat, inhibit or prevent a disease or disorder associated with aberrant expression and/or activity of a polypeptide of the invention, by way of gene therapy. Gene therapy refers to therapy performed by the administration to a subject of an expressed or expressible nucleic acid. In this embodiment of the invention, the nucleic acids produce their encoded protein that mediates a therapeutic effect.

[1691] Any of the methods for gene therapy available in the art can be used according to the present invention. Exemplary methods are described below.

[1692] For general reviews of the methods of gene therapy, see Goldspiel et al., Clinical Pharmacy 12:488-505 (1993); Wu and Wu, Biotherapy 3:87-95 (1991); Tolstoshev, Ann. Rev. Pharmacol. Toxicol. 32:573-596 (1993); Mulligan, Science 260:926-932 (1993); and Morgan and Anderson, Ann. Rev. Biochem. 62:191-217 (1993); May, TIBTECH 11 (5):155-215 (1993). Methods commonly known in the art of recombinant DNA technology which can be used are described in Ausubel et al. (eds.), Current Protocols in Molecular Biology, John Wiley & Sons, NY (1993); and Kriegler, Gene Transfer and Expression, A Laboratory Manual, Stockton Press, NY (1990).

[1693] In a preferred aspect, the compound comprises nucleic acid sequences encoding an antibody, said nucleic acid sequences being part of expression vectors that express the antibody or fragments or chimeric proteins or heavy or light chains thereof in a suitable host. In particular, such nucleic acid sequences have promoters operably linked to the antibody coding region, said promoter being inducible or constitutive, and, optionally, tissue-specific. In another particular embodiment, nucleic acid molecules are used in which the antibody coding sequences and any other desired sequences are flanked by regions that promote homologous recombination at a desired site in the genome, thus providing for intrachromosomal expression of the antibody encoding nucleic acids (Koller and Smithies, Proc. Natl. Acad. Sci. USA 86:8932-8935 (1989); Zijlstra et al., Nature 342:435-438 (1989). In specific embodiments, the expressed antibody molecule is a single chain antibody; alternatively, the nucleic acid sequences include sequences encoding both the heavy and light chains, or fragments thereof, of the antibody.

[1694] Delivery of the nucleic acids into a patient may be either direct, in which case the patient is directly exposed to the nucleic acid or nucleic acid-carrying vectors, or indirect, in which case, cells are first transformed with the nucleic acids in vitro, then transplanted into the patient. These two approaches are known, respectively, as in vivo or ex vivo gene therapy.

[1695] In a specific embodiment, the nucleic acid sequences are directly administered in vivo, where it is expressed to produce the encoded product. This can be accomplished by any of numerous methods known in the art, e.g., by constructing them as part of an appropriate nucleic acid expression vector and administering it so that they become intracellular, e.g., by infection using defective or attenuated retrovirals or other viral vectors (see U.S. Pat. No. 4,980,286), or by direct injection of naked DNA, or by use of microparticle bombardment (e.g., a gene gun; Biolistic, Dupont), or coating with lipids or cell-surface receptors or transfecting agents, encapsulation in liposomes, microparticles, or microcapsules, or by administering them in linkage to a peptide which is known to enter the nucleus, by administering it in linkage to a ligand subject to receptor-mediated endocytosis (see, e.g., Wu and Wu, J. Biol. Chem. 262:4429-4432 (1987)) (which can be used to target cell types specifically expressing the receptors), etc. In another embodiment, nucleic acid-ligand complexes can be formed in which the ligand comprises a fusogenic viral peptide to disrupt endosomes, allowing the nucleic acid to avoid lysosomal degradation. In yet another embodiment, the nucleic acid can be targeted in vivo for cell specific uptake and expression, by targeting a specific receptor (see, e.g., PCT Publications WO 92/06180; WO 92/22635; WO92/20316; WO93/14188, WO 93/20221). Alternatively, the nucleic acid can be introduced intracellularly and incorporated within host cell DNA for expression, by homologous recombination (Koller and Smithies, Proc. Natl. Acad. Sci. USA 86:8932-8935 (1989); Zijlstra et al., Nature 342:435-438 (1989)).

[1696] In a specific embodiment, viral vectors that contains nucleic acid sequences encoding an antibody of the invention are used. For example, a retroviral vector can be used (see Miller et al., Meth. Enzymol. 217:581-599 (1993)). These retroviral vectors contain the components necessary for the correct packaging of the viral genome and integration into the host cell DNA. The nucleic acid sequences encoding the antibody to be used in gene therapy are cloned into one or more vectors, which facilitates delivery of the gene into a patient. More detail about retroviral vectors can be found in Boesen et al., Biotherapy 6:291-302 (1994), which describes the use of a retroviral vector to deliver the mdr1 gene to hematopoietic stem cells in order to make the stem cells more resistant to chemotherapy. Other references illustrating the use of retroviral vectors in gene therapy are: Clowes et al., J. Clin. Invest. 93:644-651 (1994); Kiem et al., Blood 83:1467-1473 (1994); Salmons and Gunzberg, Human Gene Therapy 4:129-141 (1993); and Grossman and Wilson, Curr. Opin. in Genetics and Devel. 3:110-114 (1993).

[1697] Adenoviruses are other viral vectors that can be used in gene therapy. Adenoviruses are especially attractive vehicles for delivering genes to respiratory epithelia. Adenoviruses naturally infect respiratory epithelia where they cause a mild disease. Other targets for adenovirus-based delivery systems are liver, the central nervous system, endothelial cells, and muscle. Adenoviruses have the advantage of being capable of infecting non-dividing cells. Kozarsky and Wilson, Current Opinion in Genetics and Development 3:499-503 (1993) present a review of adenovirus-based gene therapy. Bout et al., Human Gene Therapy 5:3-10 (1994) demonstrated the use of adenovirus vectors to transfer genes to the respiratory epithelia of rhesus monkeys. Other instances of the use of adenoviruses in gene therapy can be found in Rosenfeld et al., Science 252:431-434 (1991); Rosenfeld et al., Cell 68:143-155 (1992); Mastrangeli et al., J. Clin. Invest. 91:225-234 (1993); PCT Publication WO94/12649; and Wang, et al., Gene Therapy 2:775-783 (1995). In a preferred embodiment, adenovirus vectors are used.

[1698] Adeno-associated virus (AAV) has also been proposed for use in gene therapy (Walsh et al., Proc. Soc. Exp. Biol. Med. 204:289-300 (1993); U.S. Pat. No. 5,436,146).

[1699] Another approach to gene therapy involves transferring a gene to cells in tissue culture by such methods as electroporation, lipofection, calcium phosphate mediated transfection, or viral infection. Usually, the method of transfer includes the transfer of a selectable marker to the cells. The cells are then placed under selection to isolate those cells that have taken up and are expressing the transferred gene. Those cells are then delivered to a patient.

[1700] In this embodiment, the nucleic acid is introduced into a cell prior to administration in vivo of the resulting recombinant cell. Such introduction can be carried out by any method known in the art, including but not limited to transfection, electroporation, microinjection, infection with a viral or bacteriophage vector containing the nucleic acid sequences, cell fusion, chromosome-mediated gene transfer, microcell-mediated gene transfer, spheroplast fusion, etc. Numerous techniques are known in the art for the introduction of foreign genes into cells (see, e.g., Loeffler and Behr, Meth. Enzymol. 217:599-618 (1993); Cohen et al., Meth. Enzymol. 217:618-644 (1993); Cline, Pharmac. Ther. 29:69-92m (1985) and may be used in accordance with the present invention, provided that the necessary developmental and physiological functions of the recipient cells are not disrupted. The technique should provide for the stable transfer of the nucleic acid to the cell, so that the nucleic acid is expressible by the cell and preferably heritable and expressible by its cell progeny.

[1701] The resulting recombinant cells can be delivered to a patient by various methods known in the art. Recombinant blood cells (e.g., hematopoietic stem or progenitor cells) are preferably administered intravenously. The amount of cells envisioned for use depends on the desired effect, patient state, etc., and can be determined by one skilled in the art.

[1702] Cells into which a nucleic acid can be introduced for purposes of gene therapy encompass any desired, available cell type, and include but are not limited to epithelial cells, endothelial cells, keratinocytes, fibroblasts, muscle cells, hepatocytes; blood cells such as Tlymphocytes, Blymphocytes, monocytes, macrophages, neutrophils, eosinophils, megakaryocytes, granulocytes; various stem or progenitor cells, in particular hematopoietic stem or progenitor cells, e.g., as obtained from bone marrow, umbilical cord blood, peripheral blood, fetal liver, etc.

[1703] In a preferred embodiment, the cell used for gene therapy is autologous to the patient.

[1704] In an embodiment in which recombinant cells are used in gene therapy, nucleic acid sequences encoding an antibody are introduced into the cells such that they are expressible by the cells or their progeny, and the recombinant cells are then administered in vivo for therapeutic effect. In a specific embodiment, stem or progenitor cells are used. Any stem and/or progenitor cells which can be isolated and maintained in vitro can potentially be used in accordance with this embodiment of the present invention (see e.g. PCT Publication WO 94/08598; Stemple and Anderson, Cell 71:973-985 (1992); Rheinwald, Meth. Cell Bio. 21A:229 (1980); and Pittelkow and Scott, Mayo Clinic Proc. 61:771 (1986)).

[1705] In a specific embodiment, the nucleic acid to be introduced for purposes of gene therapy comprises an inducible promoter operably linked to the coding region, such that expression of the nucleic acid is controllable by controlling the presence or absence of the appropriate inducer of transcription.

[1706] Demonstration of Therapeutic or Prophylactic Activity

[1707] The compounds or pharmaceutical compositions of the invention are preferably tested in vitro, and then in vivo for the desired therapeutic or prophylactic activity, prior to use in humans. For example, in vitro assays to demonstrate the therapeutic or prophylactic utility of a compound or pharmaceutical composition include, the effect of a compound on a cell line or a patient tissue sample. The effect of the compound or composition on the cell line and/or tissue sample can be determined utilizing techniques known to those of skill in the art including, but not limited to, rosette formation assays and cell lysis assays. In accordance with the invention, in vitro assays which can be used to determine whether administration of a specific compound is indicated, include in vitro cell culture assays in which a patient tissue sample is grown in culture, and exposed to or otherwise administered a compound, and the effect of such compound upon the tissue sample is observed.

[1708] Therapeutic/Prophylactic Administration and Composition

[1709] The invention provides methods of treatment, inhibition and prophylaxis by administration to a subject of an effective amount of a compound or pharmaceutical composition of the invention, preferably an antibody of the invention. In a preferred aspect, the compound is substantially purified (e.g., substantially free from substances that limit its effect or produce undesired side-effects). The subject is preferably an animal, including but not limited to animals such as cows, pigs, horses, chickens, cats, dogs, etc., and is preferably a mammal, and most preferably human.

[1710] Formulations and methods of administration that can be employed when the compound comprises a nucleic acid or an immunoglobulin are described above; additional appropriate formulations and routes of administration can be selected from among those described herein below.

[1711] Various delivery systems are known and can be used to administer a compound of the invention, e.g., encapsulation in liposomes, microparticles, microcapsules, recombinant cells capable of expressing the compound, receptor-mediated endocytosis (see, e.g., Wu and Wu, J. Biol. Chem. 262:4429-4432 (1987)), construction of a nucleic acid as part of a retroviral or other vector, etc. Methods of introduction include but are not limited to intradermal, intramuscular, intraperitoneal, intravenous, subcutaneous, intranasal, epidural, and oral routes. The compounds or compositions may be administered by any convenient route, for example by infusion or bolus injection, by absorption through epithelial or mucocutaneous linings (e.g., oral mucosa, rectal and intestinal mucosa, etc.) and may be administered together with other biologically active agents. Administration can be systemic or local. In addition, it may be desirable to introduce the pharmaceutical compounds or compositions of the invention into the central nervous system by any suitable route, including intraventricular and intrathecal injection; intraventricular injection may be facilitated by an intraventricular catheter, for example, attached to a reservoir, such as an Ommaya reservoir. Pulmonary administration can also be employed, e.g., by use of an inhaler or nebulizer, and formulation with an aerosolizing agent.

[1712] In a specific embodiment, it may be desirable to administer the pharmaceutical compounds or compositions of the invention locally to the area in need of treatment; this may be achieved by, for example, and not by way of limitation, local infusion during surgery, topical application, e.g., in conjunction with a wound dressing after surgery, by injection, by means of a catheter, by means of a suppository, or by means of an implant, said implant being of a porous, non-porous, or gelatinous material, including membranes, such as sialastic membranes, or fibers. Preferably, when administering a protein, including an antibody, of the invention, care must be taken to use materials to which the protein does not absorb.

[1713] In another embodiment, the compound or composition can be delivered in a vesicle, in particular a liposome (see Langer, Science 249:1527-1533 (1990); Treat et al., in Liposomes in the Therapy of Infectious Disease and Cancer, Lopez-Berestein and Fidler (eds.), Liss, New York, pp. 353-365 (1989); Lopez-Berestein, ibid., pp. 317-327; see generally ibid.)

[1714] In yet another embodiment, the compound or composition can be delivered in a controlled release system. In one embodiment, a pump may be used (see Langer, supra; Sefton, CRC Crit. Ref. Biomed. Eng. 14:201 (1987); Buchwald et al., Surgery 88:507 (1980); Saudek et al., N. Engl. J. Med. 321:574 (1989)). In another embodiment, polymeric materials can be used (see Medical Applications of Controlled Release, Langer and Wise (eds.), CRC Pres., Boca Raton, Fla. (1974); Controlled Drug Bioavailability, Drug Product Design and Performance, Smolen and Ball (eds.), Wiley, New York (1984); Ranger and Peppas, J., Macromol. Sci. Rev. Macromol. Chem. 23:61 (1983); see also Levy et al., Science 228:190 (1985); During et al., Ann. Neurol. 25:351 (1989); Howard et al., J.Neurosurg. 71:105 (1989)). In yet another embodiment, a controlled release system can be pLaced in proximity of the therapeutic target, i.e., the brain, thus requiring only a fraction of the systemic dose (see, e.g., Goodson, in Medical Applications of Controlled Release, supra, vol. 2, pp. 115-138 (1984)).

[1715] Other controlled release systems are discussed in the review by Langer (Science 249:1527-1533 (1990)).

[1716] In a specific embodiment where the compound of the invention is a nucleic acid encoding a protein, the nucleic acid can be administered in vivo to promote expression of its encoded protein, by constructing it as part of an appropriate nucleic acid expression vector and administering it so that it becomes intracellular, e.g., by use of a retroviral vector (see U.S. Pat. No. 4,980,286), or by direct injection, or by use of microparticle bombardment (e.g., a gene gun; Biolistic, Dupont), or coating with lipids or cell-surface receptors or transfecting agents, or by administering it in linkage to a homeobox-like peptide which is known to enter the nucleus (see e.g., Joliot et al., Proc. Natl. Acad. Sci. USA 88:1864-1868 (1991)), etc. Alternatively, a nucleic acid can be introduced intracellularly and incorporated within host cell DNA for expression, by homologous recombination.

[1717] The present invention also provides pharmaceutical compositions. Such compositions comprise a therapeutically effective amount of a compound, and a pharmaceutically acceptable carrier. In a specific embodiment, the term “pharmaceutically acceptable” means approved by a regulatory agency of the Federal or a state government or listed in the U.S. Pharmacopeia or other generally recognized pharmacopeia for use in animals, and more particularly in humans. The term “carrier” refers to a diluent, adjuvant, excipient, or vehicle with which the therapeutic is administered. Such pharmaceutical carriers can be sterile liquids, such as water and oils, including those of petroleum, animal, vegetable or synthetic origin, such as peanut oil, soybean oil, mineral oil, sesame oil and the like. Water is a preferred carrier when the pharmaceutical composition is administered intravenously. Saline solutions and aqueous dextrose and glycerol solutions can also be employed as liquid carriers, particularly for injectable solutions. Suitable pharmaceutical excipients include starch, glucose, lactose, sucrose, gelatin, malt, rice, flour, chalk, silica gel, sodium stearate, glycerol monostearate, talc, sodium chloride, dried skim milk, glycerol, propylene, glycol, water, ethanol and the like. The composition, if desired, can also contain minor amounts of wetting or emulsifying agents, or pH buffering agents. These compositions can take the form of solutions, suspensions, emulsion, tablets, pills, capsules, powders, sustained-release formulations and the like. The composition can be formulated as a suppository, with traditional binders and carriers such as triglycerides. Oral formulation can include standard carriers such as pharmaceutical grades of mannitol, lactose, starch, magnesium stearate, sodium saccharine, cellulose, magnesium carbonate, etc. Examples of suitable pharmaceutical carriers are described in “Remington's Pharmaceutical Sciences” by E. W. Martin. Such compositions will contain a therapeutically effective amount of the compound, preferably in purified form, together with a suitable amount of carrier so as to provide the form for proper administration to the patient. The formulation should suit the mode of administration.

[1718] In a preferred embodiment, the composition is formulated in accordance with routine procedures as a pharmaceutical composition adapted for intravenous administration to human beings. Typically, compositions for intravenous administration are solutions in sterile isotonic aqueous buffer. Where necessary, the composition may also include a solubilizing agent and a local anesthetic such as lignocaine to ease pain at the site of the injection. Generally, the ingredients are supplied either separately or mixed together in unit dosage form, for example, as a dry lyophilized powder or water free concentrate in a hermetically sealed container such as an ampoule or sachette indicating the quantity of active agent. Where the composition is to be administered by infusion, it can be dispensed with an infusion bottle containing sterile pharmaceutical grade water or saline. Where the composition is administered by injection, an ampoule of sterile water for injection or saline can be provided so that the ingredients may be mixed prior to administration.

[1719] The compounds of the invention can be formulated as neutral or salt forms. Pharmaceutically acceptable salts include those formed with anions such as those derived from hydrochloric, phosphoric, acetic, oxalic, tartaric acids, etc., and those formed with cations such as those derived from sodium, potassium, ammonium, calcium, ferric hydroxides, isopropylamine, triethylamine, 2-ethylamino ethanol, histidine, procaine, etc.

[1720] The amount of the compound of the invention which will be effective in the treatment, inhibition and prevention of a disease or disorder associated with aberrant expression and/or activity of a polypeptide of the invention can be determined by standard clinical techniques. In addition, in vitro assays may optionally be employed to help identify optimal dosage ranges. The precise dose to be employed in the formulation will also depend on the route of administration, and the seriousness of the disease or disorder, and should be decided according to the judgment of the practitioner and each patient's circumstances. Effective doses may be extrapolated from dose-response curves derived from in vitro or animal model test systems.

[1721] For antibodies, the dosage administered to a patient is typically 0.1 mg/kg to 100 mg/kg of the patient's body weight. Preferably, the dosage administered to a patient is between 0.1 mg/kg and 20 mg/kg of the patient's body weight, more preferably 1 mg/kg to 10 mg/kg of the patient's body weight. Generally, human antibodies have a longer half-life within the human body than antibodies from other species due to the immune response to the foreign polypeptides. Thus, lower dosages of human antibodies and less frequent administration is often possible. Further, the dosage and frequency of administration of antibodies of the invention may be reduced by enhancing uptake and tissue penetration (e.g., into the brain) of the antibodies by modifications such as, for example, lipidation.

[1722] The invention also provides a pharmaceutical pack or kit comprising one or more containers filled with one or more of the ingredients of the pharmaceutical compositions of the invention. Optionally associated with such container(s) can be a notice in the form prescribed by a governmental agency regulating the manufacture, use or sale of pharmaceuticals or biological products, which notice reflects approval by the agency of manufacture, use or sale for human administration.

[1723] Diagnosis and Imaging

[1724] Labeled antibodies, and derivatives and analogs thereof, which specifically bind to a polypeptide of interest can be used for diagnostic purposes to detect, diagnose, or monitor diseases, disorders, and/or conditions associated with the aberrant expression and/or activity of a polypeptide of the invention. The invention provides for the detection of aberrant expression of a polypeptide of interest, comprising (a) assaying the expression of the polypeptide of interest in cells or body fluid of an individual using one or more antibodies specific to the polypeptide interest and (b) comparing the level of gene expression with a standard gene expression level, whereby an increase or decrease in the assayed polypeptide gene expression level compared to the standard expression level is indicative of aberrant expression.

[1725] The invention provides a diagnostic assay for diagnosing a disorder, comprising (a) assaying the expression of the polypeptide of interest in cells or body fluid of an individual using one or more antibodies specific to the polypeptide interest and (b) comparing the level of gene expression with a standard gene expression level, whereby an increase or decrease in the assayed polypeptide gene expression level compared to the standard expression level is indicative of a particular disorder. With respect to cancer, the presence of a relatively high amount of transcript in biopsied tissue from an individual may indicate a predisposition for the development of the disease, or may provide a means for detecting the disease prior to the appearance of actual clinical symptoms. A more definitive diagnosis of this type may allow health professionals to employ preventative measures or aggressive treatment earlier thereby preventing the development or further progression of the cancer.

[1726] Antibodies of the invention can be used to assay protein levels in a biological sample using classical immunohistological methods known to those of skill in the art (e.g., see Jalkanen, et al., J. Cell. Biol. 101:976-985 (1985); Jalkanen, et al., J. Cell. Biol. 105:3087-3096 (1987)). Other antibody-based methods useful for detecting protein gene expression include immunoassays, such as the enzyme linked immunosorbent assay (ELISA) and the radioimmunoassay (RIA). Suitable antibody assay labels are known in the art and include enzyme labels, such as, glucose oxidase; radioisotopes, such as iodine (125I, 121I), carbon (14C), sulfur (35S), tritium (3H), indium (112In), and technetium (99Tc); luminescent labels, such as luminol; and fluorescent labels, such as fluorescein and rhodamine, and biotin.

[1727] One aspect of the invention is the detection and diagnosis of a disease or disorder associated with aberrant expression of a polypeptide of interest in an animal, preferably a mammal and most preferably a human. In one embodiment, diagnosis comprises: a) administering (for example, parenterally, subcutaneously, or intraperitoneally) to a subject an effective amount of a labeled molecule which specifically binds to the polypeptide of interest; b) waiting for a time interval following the administering for permitting the labeled molecule to preferentially concentrate at sites in the subject where the polypeptide is expressed (and for unbound labeled molecule to be cleared to background level); c) determining background level; and d) detecting the labeled molecule in the subject, such that detection of labeled molecule above the background level indicates that the subject has a particular disease or disorder associated with aberrant expression of the polypeptide of interest. Background level can be determined by various methods including, comparing the amount of labeled molecule detected to a standard value previously determined for a particular system.

[1728] It will be understood in the art that the size of the subject and the imaging system used will determine the quantity of imaging moiety needed to produce diagnostic images. In the case of a radioisotope moiety, for a human subject, the quantity of radioactivity injected will normally range from about 5 to 20 millicuries of 99 mTc. The labeled antibody or antibody fragment will then preferentially accumulate at the location of cells which contain the specific protein. In vivo tumor imaging is described in S. W. Burchiel et al., “Immunopharmacokinetics of Radiolabeled Antibodies and Their Fragments.” (Chapter 13 in Tumor Imaging: The Radiochemical Detection of Cancer, S. W. Burchiel and B. A. Rhodes, eds., Masson Publishing Inc. (1982).

[1729] Depending on several variables, including the type of label used and the mode of administration, the time interval following the administration for permitting the labeled molecule to preferentially concentrate at sites in the subject and for unbound labeled molecule to be cleared to background level is 6 to 48 hours or 6 to 24 hours or 6 to 12 hours. In another embodiment the time interval following administration is 5 to 20 days or 5 to 10 days.

[1730] In an embodiment, monitoring of the disease or disorder is carried out by repeating the method for diagnosing the disease or disease, for example, one month after initial diagnosis, six months after initial diagnosis, one year after initial diagnosis, etc.

[1731] Presence of the labeled molecule can be detected in the patient using methods known in the art for in vivo scanning. These methods depend upon the type of label used. Skilled artisans will be able to determine the appropriate method for detecting a particular label. Methods and devices that may be used in the diagnostic methods of the invention include, but are not limited to, computed tomography (CT), whole body scan such as position emission tomography (PET), magnetic resonance imaging (MRI), and sonography.

[1732] In a specific embodiment, the molecule is labeled with a radioisotope and is detected in the patient using a radiation responsive surgical instrument (Thurston et al., U.S. Pat. No. 5,441,050). In another embodiment, the molecule is labeled with a fluorescent compound and is detected in the patient using a fluorescence responsive scanning instrument. In another embodiment, the molecule is labeled with a positron emitting metal and is detected in the patent using positron emission-tomography. In yet another embodiment, the molecule is labeled with a paramagnetic label and is detected in a patient using magnetic resonance imaging (MRI).

[1733] Kits

[1734] The present invention provides kits that can be used in the above methods. In one embodiment, a kit comprises an antibody of the invention, preferably a purified antibody, in one or more containers. In a specific embodiment, the kits of the present invention contain a substantially isolated polypeptide comprising an epitope which is specifically immunoreactive with an antibody included in the kit. Preferably, the kits of the present invention further comprise a control antibody which does not react with the polypeptide of interest. In another specific embodiment, the kits of the present invention contain a means for detecting the binding of an antibody to a polypeptide of interest (e.g., the antibody may be conjugated to a detectable substrate such as a fluorescent compound, an enzymatic substrate, a radioactive compound or a luminescent compound, or a second antibody which recognizes the first antibody may be conjugated to a detectable substrate).

[1735] In another specific embodiment of the present invention, the kit is a diagnostic kit for use in screening serum containing antibodies specific against proliferative and/or cancerous polynucleotides and polypeptides. Such a kit may include a control antibody that does not react with the polypeptide of interest. Such a kit may include a substantially isolated polypeptide antigen comprising an epitope which is specifically immunoreactive with at least one anti-polypeptide antigen antibody. Further, such a kit includes means for detecting the binding of said antibody to the antigen (e.g., the antibody may be conjugated to a fluorescent compound such as fluorescein or rhodamine which can be detected by flow cytometry). In specific embodiments, the kit may include a recombinantly produced or chemically synthesized polypeptide antigen. The polypeptide antigen of the kit may also be attached to a solid support.

[1736] In a more specific embodiment the detecting means of the above-described kit includes a solid support to which said polypeptide antigen is attached. Such a kit may also include a non-attached reporter-labeled anti-human antibody. In this embodiment, binding of the antibody to the polypeptide antigen can be detected by binding of the said reporter-labeled antibody.

[1737] In an additional embodiment, the invention includes a diagnostic kit for use in screening serum containing antigens of the polypeptide of the invention. The diagnostic kit includes a substantially isolated antibody specifically immunoreactive with polypeptide or polynucleotide antigens, and means for detecting the binding of the polynucleotide or polypeptide antigen to the antibody. In one embodiment, the antibody is attached to a solid support. In a specific embodiment, the antibody may be a monoclonal antibody. The detecting means of the kit may include a second, labeled monoclonal antibody. Alternatively, or in addition, the detecting means may include a labeled, competing antigen.

[1738] In one diagnostic configuration, test serum is reacted with a solid phase reagent having a surface-bound antigen obtained by the methods of the present invention. After binding with specific antigen antibody to the reagent and removing unbound serum components by washing, the reagent is reacted with reporter-labeled anti-human antibody to bind reporter to the reagent in proportion to the amount of bound anti-antigen antibody on the solid support. The reagent is again washed to remove unbound labeled antibody, and the amount of reporter associated with the reagent is determined. Typically, the reporter is an enzyme which is detected by incubating the solid phase in the presence of a suitable fluorometric, luminescent or calorimetric substrate (Sigma, St. Louis, Mo.).

[1739] The solid surface reagent in the above assay is prepared by known techniques for attaching protein material to solid support material, such as polymeric beads, dip sticks, 96-well plate or filter material. These attachment methods generally include non-specific adsorption of the protein to the support or covalent attachment of the protein, typically through a free amine group, to a chemically reactive group on the solid support, such as an activated carboxyl, hydroxyl, or aldehyde group. Alternatively, streptavidin coated plates can be used in conjunction with biotinylated antigen(s).

[1740] Thus, the invention provides an assay system or kit for carrying out this diagnostic method. The kit generally includes a support with surface-bound recombinant antigens, and a reporter-labeled anti-human antibody for detecting surface-bound anti-antigen antibody.

[1741] Fusion Proteins

[1742] Any polypeptide of the present invention can be used to generate fusion proteins. For example, the polypeptide of the present invention, when fused to a second protein, can be used as an antigenic tag. Antibodies raised against the polypeptide of the present invention can be used to indirectly detect the second protein by binding to the polypeptide. Moreover, because secreted proteins target cellular locations based on trafficking signals, the polypeptides of the present invention can be used as targeting molecules once fused to other proteins.

[1743] Examples of domains that can be fused to polypeptides of the present invention include not only heterologous signal sequences, but also other heterologous functional regions. The fusion does not necessarily need to be direct, but may occur through linker sequences.

[1744] Moreover, fusion proteins may also be engineered to improve characteristics of the polypeptide of the present invention. For instance, a region of additional amino acids, particularly charged amino acids, may be added to the N-terminus of the polypeptide to improve stability and persistence during purification from the host cell or subsequent handling and storage. Also, peptide moieties may be added to the polypeptide to facilitate purification. Such regions may be removed prior to final preparation of the polypeptide. The addition of peptide moieties to facilitate handling of polypeptides are familiar and routine techniques in the art.

[1745] Moreover, polypeptides of the present invention, including fragments, and specifically epitopes, can be combined with parts of the constant domain of immunoglobulins (IgA, IgE, IgG, IgM) or portions thereof (CH1, CH2, CH3, and any combination thereof, including both entire domains and portions thereof), resulting in chimeric polypeptides. These fusion proteins facilitate purification and show an increased half-life in vivo. One reported example describes chimeric proteins consisting of the first two domains of the human CD4-polypeptide and various domains of the constant regions of the heavy or light chains of mammalian immunoglobulins. (EP A 394,827; Traunecker et al., Nature 331:84-86 (1988).) Fusion proteins having disulfide-linked dimeric structures (due to the IgG) can also be more efficient in binding and neutralizing other molecules, than the monomeric secreted protein or protein fragment alone. (Fountoulakis et al., J. Biochem. 270:3958-3964 (1995).) Polynucleotides comprising or alternatively consisting of nucleic acids which encode these fusion proteins are also encompassed by the invention.

[1746] Similarly, EP-A-O 464 533 (Canadian counterpart 2045869) discloses fusion proteins comprising various portions of constant region of immunoglobulin molecules together with another human protein or part thereof. In many cases, the Fc part in a fusion protein is beneficial in therapy and diagnosis, and thus can result in, for example, improved pharmacokinetic properties. (EP-A 0232 262.) Alternatively, deleting the Fc part after the fusion protein has been expressed, detected, and purified, would be desired. For example, the Fc portion may hinder therapy and diagnosis if the fusion protein is used as an antigen for immunizations. In drug discovery, for example, human proteins, such as hIL-5, have been fused with Fc portions for the purpose of high-throughput screening assays to identify antagonists of hIL-5. (See, D. Bennett et al., J. Molecular Recognition 8:52-58 (1995); K. Johanson et al., J. Biol. Chem. 270:9459-9471 (1995).)

[1747] Moreover, the polypeptides of the present invention can be fused to marker sequences, such as a peptide which facilitates purification of the fused polypeptide. In preferred embodiments, the marker amino acid sequence is a hexa-histidine peptide, such as the tag provided in a pQE vector (QIAGEN, Inc., 9259 Eton Avenue, Chatsworth, Calif., 91311), among others, many of which are commercially available. As described in Gentz et al., Proc. Natl. Acad. Sci. USA 86:821-824 (1989), for instance, hexa-histidine provides for convenient purification of the fusion protein. Another peptide tag useful for purification, the “HA” tag, corresponds to an epitope derived from the influenza hemagglutinin protein. (Wilson et al., Cell 37:767 (1984).)

[1748] Thus, any of these above fusions can be engineered using the polynucleotides or the polypeptides of the present invention.

[1749] Vectors, Host Cells, and Protein Production

[1750] The present invention also relates to vectors containing the polynucleotide of the present invention, host cells, and the production of polypeptides by recombinant techniques. The vector may be, for example, a phage, plasmid, viral, or retroviral vector. Retroviral vectors may be replication competent or replication defective. In the latter case, viral propagation generally will occur only in complementing host cells.

[1751] The polynucleotides may be joined to a vector containing a selectable marker for propagation in a host. Generally, a plasmid vector is introduced in a precipitate, such as a calcium phosphate precipitate, or in a complex with a charged lipid. If the vector is a virus, it may be packaged in vitro using an appropriate packaging cell line and then transduced into host cells.

[1752] The polynucleotide insert should be operatively linked to an appropriate promoter, such as the phage lambda PL promoter, the E. coli lac, trp, phoA and tac promoters, the SV40 early and late promoters and promoters of retroviral LTRs, to name a few. Other suitable promoters will be known to the skilled artisan. The expression constructs will further contain sites for transcription initiation, termination, and, in the transcribed region, a ribosome binding site for translation. The coding portion of the transcripts expressed by the constructs will preferably include a translation initiating codon at the beginning and a termination codon (UAA, UGA or UAG) appropriately positioned at the end of the polypeptide to be translated.

[1753] As indicated, the expression vectors will preferably include at least one selectable marker. Such markers include dihydrofolate reductase, G418 or neomycin resistance for eukaryotic cell culture and tetracycline, kanamycin or ampicillin resistance genes for culturing in E. coli and other bacteria. Representative examples of appropriate hosts include, but are not limited to, bacterial cells, such as E. coli, Streptomyces and Salmonella typhimurium cells; fungal cells, such as yeast cells (e.g., Saccharomyces cerevisiae or Pichia pastoris (ATCC Accession No. 201178)); insect cells such as Drosophila S2 and Spodoptera Sf9 cells; animal cells such as CHO, COS, 293, and Bowes melanoma cells; and plant cells. Appropriate culture mediums and conditions for the above-described host cells are known in the art.

[1754] Among vectors preferred for use in bacteria include pQE70, pQE60 and pQE-9, available from QIAGEN, Inc.; pBluescript vectors, Phagescript vectors, pNH8A, pNH16a, pNH18A, pNH46A, available from Stratagene Cloning Systems, Inc.; and ptrc99a, pKK223-3, pKK233-3, pDR540, pRIT5 available from Pharmacia Biotech, Inc. Among preferred eukaryotic vectors are pWLNEO, pSV2CAT, pOG44, pXT1 and pSG available from Stratagene; and pSVK3, pBPV, pMSG and pSVL available from Pharmacia. Preferred expression vectors for use in yeast systems include, but are not limited to pYES2, pYD1, pTEF1/Zeo, pYES2/GS, pPICZ, pGAPZ, pGAPZalph, pPIC9, pPIC3.5, pHIL-D2, pHIL-S1, pPIC3.5K, pPIC9K, and PAO815 (all available from Invitrogen, Carlbad, Calif.). Other suitable vectors will be readily apparent to the skilled artisan.

[1755] Introduction of the construct into the host cell can be effected by calcium phosphate transfection, DEAE-dextran mediated transfection, cationic lipid-mediated transfection, electroporation, transduction, infection, or other methods. Such methods are described in many standard laboratory manuals, such as Davis et al., Basic Methods In Molecular Biology (1986). It is specifically contemplated that the polypeptides of the present invention may in fact be expressed by a host cell lacking a recombinant vector.

[1756] A polypeptide of this invention can be recovered and purified from recombinant cell cultures by well-known methods including ammonium sulfate or ethanol precipitation, acid extraction, anion or cation exchange chromatography, phosphocellulose chromatography, hydrophobic interaction chromatography, affinity chromatography, hydroxylapatite chromatography and lectin chromatography. Most preferably, high performance liquid chromatography (“HPLC”) is employed for purification.

[1757] Polypeptides of the present invention, and preferably the secreted form, can also be recovered from: products purified from natural sources, including bodily fluids, tissues and cells, whether directly isolated or cultured; products of chemical synthetic procedures; and products produced by recombinant techniques from a prokaryotic or eukaryotic host, including, for example, bacterial, yeast, higher plant, insect, and mammalian cells. Depending upon the host employed in a recombinant production procedure, the polypeptides of the present invention may be glycosylated or may be non-glycosylated. In addition, polypeptides of the invention may also include an initial modified methionine residue, in some cases as a result of host-mediated processes. Thus, it is well known in the art that the N-terminal methionine encoded by the translation initiation codon generally is removed with high efficiency from any protein after translation in all eukaryotic cells. UVhile the N-terminal methionine on most proteins also is efficiently removed in most prokaryotes, for some proteins, this prokaryotic removal process is inefficient, depending on the nature of the amino acid to which the N-terminal methionine is covalently linked.

[1758] In one embodiment, the yeast Pichia pastoris is used to express the polypeptide of the present invention in a eukaryotic system. Pichia pastoris is a methylotrophic yeast which can metabolize methanol as its sole carbon source. A main step in the methanol metabolization pathway is the oxidation of methanol to formaldehyde using O₂. This reaction is catalyzed by the enzyme alcohol oxidase. In order to metabolize methanol as its sole carbon source, Pichia pastoris must generate high levels of alcohol oxidase due, in part, to the relatively low affinity of alcohol oxidase for O₂. Consequently, in a growth medium depending on methanol as a main carbon source, the promoter region of one of the two alcohol oxidase genes (AOX1) is highly active. In the presence of methanol, alcohol oxidase produced from the AOX1 gene comprises up to approximately 30% of the total soluble protein in Pichia pastoris. See, Ellis, S. B., et al., Mol. Cell. Biol. 5:1111-21 (1985); Koutz, P. J, et al., Yeast 5:167-77 (1989); Tschopp, J. F., et al., Nucl. Acids Res. 15:3859-76 (1987). Thus, a heterologous coding sequence, such as, for example, a polynucleotide of the present invention, under the transcriptional regulation of all or part of the AOX1 regulatory sequence is expressed at exceptionally high levels in Pichia yeast grown in the presence of methanol.

[1759] In one example, the plasmid vector pPIC9K is used to express DNA encoding a polypeptide of the invention, as set forth herein, in a Pichea yeast system essentially as described in “Pichia Protocols: Methods in Molecular Biology,” D. R. Higgins and J. Cregg, eds. The Humana Press, Totowa, N.J., 1998. This expression vector allows expression and secretion of a protein of the invention by virtue of the strong AOX1 promoter linked to the Pichia pastoris alkaline phosphatase (PHO) secretory signal peptide (i.e., leader) located upstream of a multiple cloning site.

[1760] Many other yeast vectors could be used in place of pPIC9K, such as, pYES2, pYD1, pTEF1/Zeo, pYES2/GS, pPICZ, pGAPZ, pGAPZalpha, pPIC9, pPIC3.5, pHIL-D2, pHIL-S1, pPIC3.5K, and PAO815, as one skilled in the art would readily appreciate, as long as the proposed expression construct provides appropriately located signals for transcription, translation, secretion (if desired), and the like, including an in-frame AUG as required.

[1761] In another embodiment, high-level expression of a heterologous coding sequence, such as, for example, a polynucleotide of the present invention, may be achieved by cloning the heterologous polynucleotide of the invention into an expression vector such as, for example, pGAPZ or pGAPZalpha, and growing the yeast culture in the absence of methanol.

[1762] In addition to encompassing host cells containing the vector constructs discussed herein, the invention also encompasses primary, secondary, and immortalized host cells of vertebrate origin, particularly mammalian origin, that have been engineered to delete or replace endogenous genetic material (e.g., coding sequence), and/or to include genetic material (e.g., heterologous polynucleotide sequences) that is operably associated with the polynucleotides of the invention, and which activates, alters, and/or amplifies endogenous polynucleotides. For example, techniques known in the art may be used to operably associate heterologous control regions (e.g., promoter and/or enhancer) and endogenous polynucleotide sequences via homologous recombination, resulting in the formation of a new transcription unit (see, e.g., U.S. Pat. No. 5,641,670, issued Jun. 24, 1997; U.S. Pat. No. 5,733,761, issued Mar. 31, 1998; International Publication No. WO 96/29411, published Sep. 26, 1996; International Publication No. WO 94/12650, published Aug. 4, 1994; Koller et al., Proc. Natl. Acad. Sci. USA 86:8932-8935 (1989); and Zijlstra et al., Nature 342:435-438 (1989), the disclosures of each of which are incorporated by reference in their entireties).

[1763] In addition, polypeptides of the invention can be chemically synthesized using techniques known in the art (e.g., see Creighton, 1983, Proteins: Structures and Molecular Principles, W. H. Freeman & Co., N.Y., and Hunkapiller et al., Nature, 310:105-111 (1984)). For example, a polypeptide corresponding to a fragment of a polypeptide sequence of the invention can be synthesized by use of a peptide synthesizer. Furthermore, if desired, nonclassical amino acids or chemical amino acid analogs can be introduced as a substitution or addition into the polypeptide sequence. Non-classical amino acids include, but are not limited to, to the D-isomers of the common amino acids, 2,4-diaminobutyric acid, a-amino isobutyric acid, 4-aminobutyric acid, Abu, 2-amino butyric acid, g-Abu, e-Ahx, 6-amino hexanoic acid, Aib, 2-amino isobutyric acid, 3-amino propionic acid, omithine, norleucine, norvaline, hydroxyproline, sarcosine, citrulline, homocitrulline, cysteic acid, t-butylglycine, t-butylalanine, phenylglycine, cyclohexylalanine, b-alanine, fluoro-amino acids, designer amino acids such as b-methyl amino acids, Ca-methyl amino acids, Na-methyl amino acids, and amino acid analogs in general. Furthermore, the amino acid can be D (dextrorotary) or L (levorotary).

[1764] The invention encompasses polypeptides which are differentially modified during or after translation, e.g., by glycosylation, acetylation, phosphorylation, amidation, derivatization by known protecting/blocking groups, proteolytic cleavage, linkage to an antibody molecule or other cellular ligand, etc. Any of numerous chemical modifications may be carried out by known techniques, including but not limited, to specific chemical cleavage by cyanogen bromide, trypsin, chymotrypsin, papain, V8 protease, NaBH₄; acetylation, formylation, oxidation, reduction; metabolic synthesis in the presence of tunicamycin; etc.

[1765] Additional post-translational modifications encompassed by the invention include, for example, e.g., N-linked or O-linked carbohydrate chains, processing of N-terminal or C-terminal ends), attachment of chemical moieties to the amino acid backbone, chemical modifications of N-linked or O-linked carbohydrate chains, and addition or deletion of an N-terminal methionine residue as a result of procaryotic host cell expression. The polypeptides may also be modified with a detectable label, such as an enzymatic, fluorescent, isotopic or affinity label to allow for detection and isolation of the protein.

[1766] Also provided by the invention are chemically modified derivatives of the polypeptides of the invention which may provide additional advantages such as increased solubility, stability and circulating time of the polypeptide, or decreased immunogenicity (see U.S. Pat. No. 4,179,337). The chemical moieties for derivitization may be selected from water soluble polymers such as polyethylene glycol, ethylene glycol/propylene glycol copolymers, carboxymethylcellulose, dextran, polyvinyl alcohol and the like. The polypeptides may be modified at random positions within the molecule, or at predetermined positions within the molecule and may include one, two, three or more attached chemical moieties.

[1767] The polymer may be of any molecular weight, and may be branched or unbranched. For polyethylene glycol, the preferred molecular weight is between about 1 kDa and about 100 kDa (the term “about” indicating that in preparations of polyethylene glycol, some molecules will weigh more, some less, than the stated molecular weight) for ease in handling and manufacturing. Other sizes may be used, depending on the desired therapeutic profile (e.g., the duration of sustained release desired, the effects, if any on biological activity, the ease in handling, the degree or lack of antigenicity and other known effects of the polyethylene glycol to a therapeutic protein or analog). For example, the polyethylene glycol may have an average molecular weight of about 200, 500, 1000, 1500, 2000, 2500, 3000, 3500, 4000, 4500, 5000, 5500, 6000, 6500, 7000, 7500, 8000, 8500, 9000, 9500, 10,000, 10,500, 11,000, 11,500, 12,000, 12,500, 13,000, 13,500, 14,000, 14,500, 15,000, 15,500, 16,000, 16,500, 17,000, 17,500, 18,000, 18,500, 19,000, 19,500, 20,000, 25,000, 30,000, 35,000, 40,000, 50,000, 55,000, 60,000, 65,000, 70,000, 75,000, 80,000, 85,000, 90,000, 95,000, or 100,000 kDa.

[1768] As noted above, the polyethylene glycol may have a branched structure. Branched polyethylene glycols are described, for example, in U.S. Pat. No. 5,643,575; Morpurgo et al., Appl. Biochem. Biotechnol. 56:59-72 (1996); Vorobjev et al., Nucleosides Nucleotides 18:2745-2750 (1999); and Caliceti et al., Bioconjug. Chem. 10:638-646 (1999), the disclosures of each of which are incorporated herein by reference.

[1769] The polyethylene glycol molecules (or other chemical moieties) should be attached to the protein with consideration of effects on functional or antigenic domains of the protein. There are a number of attachment methods available to those skilled in the art, e.g., EP 0 401 384, herein incorporated by reference (coupling PEG to G-CSF), see also Malik et al., Exp. Hematol. 20:1028-1035 (1992) (reporting pegylation of GM-CSF using tresyl chloride). For example, polyethylene glycol may be covalently bound through amino acid residues via a reactive group, such as, a free amino or carboxyl group. Reactive groups are those to which an activated polyethylene glycol molecule may be bound. The amino acid residues having a free amino group may include lysine residues and the N-terminal amino acid residues; those having a free carboxyl group may include aspartic acid residues glutamic acid residues and the C-terminal amino acid residue. Sulfhydryl groups may also be used as a reactive group for attaching the polyethylene glycol molecules. Preferred for therapeutic purposes is attachment at an amino group, such as attachment at the N-terminus or lysine group.

[1770] As suggested above, polyethylene glycol may be attached to proteins via linkage to any of a number of amino acid residues. For example, polyethylene glycol can be linked to a proteins via covalent bonds to lysine, histidine, aspartic acid, glutamic acid, or cysteine residues. One or more reaction chemistries may be employed to attach polyethylene glycol to specific amino acid residues (e.g., lysine, histidine, aspartic acid, glutamic acid, or cysteine) of the protein or to more than one type of amino acid residue (e.g., lysine, histidine, aspartic acid, glutamic acid, cysteine and combinations thereof) of the protein.

[1771] One may specifically desire proteins chemically modified at the N-terminus. Using polyethylene glycol as an illustration of the present composition, one may select from a variety of polyethylene glycol molecules (by molecular weight, branching, etc.), the proportion of polyethylene glycol molecules to protein (polypeptide) molecules in the reaction mix, the type of pegylation reaction to be performed, and the method of obtaining the selected N-terminally pegylated protein. The method of obtaining the N-terminally pegylated preparation (i.e., separating this moiety from other monopegylated moieties if necessary) may be by purification of the N-terminally pegylated material from a population of pegylated protein molecules. Selective proteins chemically modified at the N-terminus modification may be accomplished by reductive alkylation which exploits differential reactivity of different types of primary amino groups (lysine versus the N-terminal) available for derivatization in a particular protein. Under the appropriate reaction conditions, substantially selective derivatization of the protein at the N-terminus with a carbonyl group containing polymer is achieved.

[1772] As indicated above, pegylation of the proteins of the invention may be accomplished by any number of means. For example, polyethylene glycol may be attached to the protein either directly or by an intervening linker. Linkerless systems for attaching polyethylene glycol to proteins are described in Delgado et al., Crit. Rev. Thera. Drug Carrier Sys. 9:249-304 (1992); Francis et al., Intern. J. of Hematol. 68:1-18 (1998); U.S. Pat. No. 4,002,531; U.S. Pat. No. 5,349,052; WO 95/06058; and WO 98/32466, the disclosures of each of which are incorporated herein by 110 reference.

[1773] One system for attaching polyethylene glycol directly to amino acid residues of proteins without an intervening linker employs tresylated MPEG, which is produced by the modification of monmethoxy polyethylene glycol (MPEG) using tresylchloride (ClSO₂CH₂CF₃). Upon reaction of protein with tresylated MPEG, polyethylene glycol is directly attached to amine groups of the protein. Thus, the invention includes protein-polyethylene glycol conjugates produced by reacting proteins of the invention with a polyethylene glycol molecule having a 2,2,2-trifuoreothane sulphonyl group.

[1774] Polyethylene glycol can also be attached to proteins using a number of different intervening linkers. For example, U.S. Pat. No. 5,612,460, the entire disclosure of which is incorporated herein by reference, discloses urethane linkers for connecting polyethylene glycol to proteins. Protein-polyethylene glycol conjugates wherein the polyethylene glycol is attached to the protein by a linker can also be produced by reaction of proteins with compounds such as MPEG-succinimidylsuccinate, MPEG activated with 1,1′-carbonyldiimidazole, MPEG-2,4,5-trichloropenylcarbonate, MPEG-p-nitrophenolcarbonate, and various MPEG-succinate derivatives. A number additional polyethylene glycol derivatives and reaction chemistries for attaching polyethylene glycol to proteins are described in WO 98/32466, the entire disclosure of which is incorporated herein by reference. Pegylated protein products produced using the reaction chemistries set out herein are included within the scope of the invention.

[1775] The number of polyethylene glycol moieties attached to each protein of the invention (i.e., the degree of substitution) may also vary. For example, the pegylated proteins of the invention may be linked, on average, to 1, 2, 3, 4, 5, 6, 7, 8, 9, 10, 12, 15, 17, 20, or more polyethylene glycol molecules. Similarly, the average degree of substitution within ranges such as 1-3,2-4, 3-5,4-6, 5-7,6-8, 7-9,8-10, 9-11, 10-12, 11-13, 12-14, 13-15, 14-16, 15-17, 16-18, 17-19, or 18-20 polyethylene glycol moieties per protein molecule. Methods for determining the degree of substitution are discussed, for example, in Delgado et al., Crit. Rev. Thera. Drug Carrier Sys. 9:249-304 (1992).

[1776] The polypeptides of the invention may be in monomers or multimers (i.e., dimers, trimers, tetramers and higher multimers). Accordingly, the present invention relates to monomers and multimers of the polypeptides of the invention, their preparation, and compositions preferably, Therapeutics) containing them. In specific embodiments, the polypeptides of the invention are monomers, dimers, trimers or tetramers. In additional embodiments, the multimers of the invention are at least dimers, at least trimers, or at least tetramers.

[1777] Multimers encompassed by the invention may be homomers or heteromers. As used herein, the term homomer, refers to a multimer containing only polypeptides corresponding to the amino acid sequence of SEQ ID NO:Y or encoded by the cDNA contained in a deposited clone (including fragments, variants, splice variants, and fusion proteins, corresponding to these polypeptides as described herein). These homomers may contain polypeptides having identical or different amino acid sequences. In a specific embodiment, a homomer of the invention is a multimer containing only polypeptides having an identical amino acid sequence. In another specific embodiment, a homomer of the invention is a multimer containing polypeptides having different amino acid sequences. In specific embodiments, the multimer of the invention is a homodimer (e.g., containing polypeptides having identical or different amino acid sequences) or a homotrimer (e.g., containing polypeptides having identical and/or different amino acid sequences). In additional embodiments, the homomeric multimer of the invention is at least a homodimer, at least a homotrimer, or at least a homotetramer.

[1778] As used herein, the term heteromer refers to a multimer containing one or more heterologous polypeptides (i.e., polypeptides of different proteins) in addition to the polypeptides of the invention. In a specific embodiment, the multimer of the invention is a heterodimer, a heterotrimer, or a heterotetramer. In additional embodiments, the heteromeric multimer of the invention is at least a heterodimer, at least a heterotrimer, or at least a heterotetramer.

[1779] Multimers of the invention may be the result of hydrophobic, hydrophilic, ionic and/or covalent associations and/or may be indirectly linked, by for example, liposome formation. Thus, in one embodiment, multimers of the invention, such as, for example, homodimers or homotrimers, are formed when polypeptides of the invention contact one another in solution. In another embodiment, heteromultimers of the invention, such as, for example, heterotrimers or heterotetramers, are formed when polypeptides of the invention contact antibodies to the polypeptides of the invention (including antibodies to the heterologous polypeptide sequence in a fusion protein of the invention) in solution. In other embodiments, multimers of the invention are formed by covalent associations with and/or between the polypeptides of the invention. Such covalent associations may involve one or more amino acid residues contained in the polypeptide sequence (e.g., that recited in the sequence listing, or contained in the polypeptide encoded by a deposited clone). In one instance, the covalent associations are cross-linking between cysteine residues located within the polypeptide sequences which interact in the native (i.e., naturally occurring) polypeptide. In another instance, the covalent associations are the consequence of chemical or recombinant manipulation. Alternatively, such covalent associations may involve one or more amino acid residues contained in the heterologous polypeptide sequence in a fusion protein of the invention.

[1780] In one example, covalent associations are between the heterologous sequence contained in a fusion protein of the invention (see, e.g., U.S. Pat. No. 5,478,925). In a specific example, the covalent associations are between the heterologous sequence contained in an Fc fusion protein of the invention (as described herein). In another specific example, covalent associations of fusion proteins of the invention are between heterologous polypeptide sequence from another protein that is capable of forming covalently associated multimers, such as for example, oseteoprotegerin (see, e.g., International Publication NO: WO 98/49305, the contents of which are herein incorporated by reference in its entirety). In another embodiment, two or more polypeptides of the invention are joined through peptide linkers. Examples include those peptide linkers described in U.S. Pat. No. 5,073,627 (hereby incorporated by reference). Proteins comprising multiple polypeptides of the invention separated by peptide linkers may be produced using conventional recombinant DNA technology.

[1781] Another method for preparing multimer polypeptides of the invention involves use of polypeptides of the invention fused to a leucine zipper or isoleucine zipper polypeptide sequence. Leucine zipper and isoleucine zipper domains are polypeptides that promote multimerization of the proteins in which they are found. Leucine zippers were originally identified in several DNA-binding proteins (Landschulz et al., Science 240:1759, (1988)), and have since been found in a variety of different proteins. Among the known leucine zippers are naturally occurring peptides and derivatives thereof that dimerize or trimerize. Examples of leucine zipper domains suitable for producing soluble multimeric proteins of the invention are those described in PCT application WO 94/10308, hereby incorporated by reference. Recombinant fusion proteins comprising a polypeptide of the invention fused to a polypeptide sequence that dimerizes or trimerizes in solution are expressed in suitable host cells, and the resulting soluble multimeric fusion protein is recovered from the culture supernatant using techniques known in the art.

[1782] Trimeric polypeptides of the invention may offer the advantage of enhanced biological activity. Preferred leucine zipper moieties and isoleucine moieties are those that preferentially form trimers. One example is a leucine zipper derived from lung surfactant protein D (SPD), as described in Hoppe et al. (FEBS Letters 344:191, (1994)) and in U.S. patent application Ser. No. 08/446,922, hereby incorporated by reference. Other peptides derived from naturally occurring trimeric proteins may be employed in preparing trimeric polypeptides of the invention.

[1783] In another example, proteins of the invention are associated by interactions between Flag® polypeptide sequence contained in fusion proteins of the invention containing Flag® polypeptide seuqence. In a further embodiment, associations proteins of the invention are associated by interactions between heterologous polypeptide sequence contained in Flag® fusion proteins of the invention and anti-Flag® antibody.

[1784] The multimers of the invention may be generated using chemical techniques known in the art. For example, polypeptides desired to be contained in the multimers of the invention may be chemically cross-linked using linker molecules and linker molecule length optimization techniques known in the art (see, e.g., U.S. Pat. No. 5,478,925, which is herein incorporated by reference in its entirety). Additionally, multimers of the invention may be generated using techniques known in the art to form one or more inter-molecule cross-links between the cysteine residues located within the sequence of the polypeptides desired to be contained in the multimer (see, e.g., U.S. Pat. No. 5,478,925, which is herein incorporated by reference in its entirety). Further, polypeptides of the invention may be routinely modified by the addition of cysteine or biotin to the C terminus or N-terminus of the polypeptide and techniques known in the art may be applied to generate multimers containing one or more of these modified polypeptides (see, e.g., U.S. Pat. No. 5,478,925, which is herein incorporated by reference in its entirety). Additionally, techniques known in the art may be applied to generate liposomes containing the polypeptide components desired to be contained in the multimer of the invention (see, e.g., U.S. Pat. No. 5,478,925, which is herein incorporated by reference in its entirety).

[1785] Alternatively, multimers of the invention may be generated using genetic engineering techniques known in the art. In one embodiment, polypeptides contained in multimers of the invention are produced recombinantly using fusion protein technology described herein or otherwise known in the art (see, e.g., U.S. Pat. No. 5,478,925, which is herein incorporated by reference in its entirety). In a specific embodiment, polynucleotides coding for a homodimer of the invention are generated by ligating a polynucleotide sequence encoding a polypeptide of the invention to a sequence encoding a linker polypeptide and then further to a synthetic polynucleotide encoding the translated product of the polypeptide in the reverse orientation from the original C-terminus to the N-terminus (lacking the leader sequence) (see, e.g., U.S. Pat. No. 5,478,925, which is herein incorporated by reference in its entirety). In another embodiment, recombinant techniques described herein or otherwise known in the art are applied to generate recombinant polypeptides of the invention which contain a transmembrane domain (or hyrophobic or signal peptide) and which can be incorporated by membrane reconstitution techniques into liposomes (see, e.g., U.S. Pat. No. 5,478,925, which is herein incorporated by reference in its entirety).

[1786] Uses of the Polynucleotides

[1787] Each of the polynucleotides identified herein can be used in numerous ways as reagents. The following description should be considered exemplary and utilizes known techniques.

[1788] The polynucleotides of the present invention are useful for chromosome identification. There exists an ongoing need to identify new chromosome markers, since few chromosome marking reagents, based on actual sequence data (repeat polymorphisms), are presently available. Each polynucleotide of the present invention can be used as a chromosome marker.

[1789] Briefly, sequences can be mapped to chromosomes by preparing PCR primers (preferably 15-25 bp) from the sequences shown in SEQ ID NO:X. Primers can be selected using computer analysis so that primers do not span more than one predicted exon in the genomic DNA. These primers are then used for PCR screening of somatic cell hybrids containing individual human chromosomes. Only those hybrids containing the human gene corresponding to the SEQ ID NO:X will yield an amplified fragment.

[1790] Similarly, somatic hybrids provide a rapid method of PCR mapping the polynucleotides to particular chromosomes. Three or more clones can be assigned per day using a single thermal cycler. Moreover, sublocalization of the polynucleotides can be achieved with panels of specific chromosome fragments. Other gene mapping strategies that can be used include in situ hybridization, prescreening with labeled flow-sorted chromosomes, preselection by hybridization to construct chromosome specific-cDNA libraries and computer mapping techniques (See, e.g., Shuler, Trends Biotechnol 16:456-459 (1998) which is hereby incorporated by reference in its entirety).

[1791] Precise chromosomal location of the polynucleotides can also be achieved using fluorescence in situ hybridization (FISH) of a metaphase chromosomal spread. This technique uses polynucleotides as short as 500 or 600 bases; however, polynucleotides 2,000-4,000 bp are preferred. For a review of this technique, see Verma et al., “Human Chromosomes: a Manual of Basic Techniques,” Pergamon Press, New York (1988).

[1792] For chromosome mapping, the polynucleotides can be used individually (to mark a single chromosome or a single site on that chromosome) or in panels (for marking multiple sites and/or multiple chromosomes).

[1793] The polynucleotides of the present invention would likewise be useful for radiation hybrid mapping, HAPPY mapping, and long range restriction mapping. For a review of these techniques and others known in the art, see, e.g., Dear, “Genome Mapping: A Practical Approach,” IRL Press at Oxford University Press, London (1997); Aydin, J. Mol. Med. 77:691-694 (1999); Hacia et al., Mol. Psychiatry 3:483-492 (1998); Herrick et al., Chromosome Res. 7:409-423 (1999); Hamilton et al., Methods Cell Biol. 62:265-280 (2000); and/or Ott, J. Hered. 90:68-70 (1999) each of which is hereby incorporated by reference in its entirety.

[1794] Once a polynucleotide has been mapped to a precise chromosomal location, the physical position of the polynucleotide can be used in linkage analysis. Linkage analysis establishes coinheritance between a chromosomal location and presentation of a particular disease. (Disease mapping data are found, for example, in V. McKusick, Mendelian Inheritance in Man (available on line through Johns Hopkins University Welch Medical Library).) Assuming 1 megabase mapping resolution and one gene per 20 kb, a cDNA precisely localized to a chromosomal region associated with the disease could be one of 50-500 potential causative genes.

[1795] Thus, once coinheritance is established, differences in the polynucleotide and the corresponding gene between affected and unaffected individuals can be examined. First, visible structural alterations in the chromosomes, such as deletions or translocations, are examined in chromosome spreads or by PCR. If no structural alterations exist, the presence of point mutations are ascertained. Mutations observed in some or all affected individuals, but not in normal individuals, indicates that the mutation may cause the disease. However, complete sequencing of the polypeptide and the corresponding gene from several normal individuals is required to distinguish the mutation from a polymorphism. If a new polymorphism is identified, this polymorphic polypeptide can be used for further linkage analysis.

[1796] Furthermore, increased or decreased expression of the gene in affected individuals as compared to unaffected individuals can be assessed using polynucleotides of the present invention. Any of these alterations (altered expression, chromosomal rearrangement, or mutation) can be used as a diagnostic or prognostic marker.

[1797] Thus, the invention also provides a diagnostic method useful during diagnosis of a disorder, involving measuring the expression level of polynucleotides of the present invention in cells or body fluid from an individual and comparing the measured gene expression level with a standard level of polynucleotide expression level, whereby an increase or decrease in the gene expression level compared to the standard is indicative of a disorder.

[1798] In still another embodiment, the invention includes a kit for analyzing samples for the presence of proliferative and/or cancerous polynucleotides derived from a test subject. In a general embodiment, the kit includes at least one polynucleotide probe containing a nucleotide sequence that will specifically hybridize with a polynucleotide of the present invention and a suitable container. In a specific embodiment, the kit includes two polynucleotide probes defining an internal region of the polynucleotide of the present invention, where each probe has one strand containing a 31′mer-end internal to the region. In a further embodiment, the probes may be useful as primers for polymerase chain reaction amplification.

[1799] Where a diagnosis of a disorder, has already been made according to conventional methods, the present invention is useful as a prognostic indicator, whereby patients exhibiting enhanced or depressed polynucleotide of the present invention expression will experience a worse clinical outcome relative to patients expressing the gene at a level nearer the standard level.

[1800] By “measuring the expression level of polynucleotide of the present invention” is intended qualitatively or quantitatively measuring or estimating the level of the polypeptide of the present invention or the level of the mRNA encoding the polypeptide in a first biological sample either directly (e.g., by determining or estimating absolute protein level or mRNA level) or relatively (e.g., by comparing to the polypeptide level or mRNA level in a second biological sample). Preferably, the polypeptide level or mRNA level in the first biological sample is measured or estimated and compared to a standard polypeptide level or mRNA level, the standard being taken from a second biological sample obtained from an individual not having the disorder or being determined by averaging levels from a population of individuals not having a disorder. As will be appreciated in the art, once a standard polypeptide level or mRNA level is known, it can be used repeatedly as a standard for comparison.

[1801] By “biological sample” is intended any biological sample obtained from an individual, body fluid, cell line, tissue culture, or other source which contains the polypeptide of the present invention or mRNA. As indicated, biological samples include body fluids (such as semen, lymph, sera, plasma, urine, synovial fluid and spinal fluid) which contain the polypeptide of the present invention, and other tissue sources found to express the polypeptide of the present invention. Methods for obtaining tissue biopsies and body fluids from mammals are well known in the art. Where the biological sample is to include mRNA, a tissue biopsy is the preferred source.

[1802] The method(s) provided above may preferrably be applied in a diagnostic method and/or kits in which polynucleotides and/or polypeptides are attached to a solid support. In one exemplary method, the support may be a “gene chip” or a “biological chip” as described in U.S. Pat. Nos. 5,837,832, 5,874,219, and 5,856,174. Further, such a gene chip with polynucleotides of the present invention attached may be used to identify polymorphisms between the polynucleotide sequences, with polynucleotides isolated from a test subject. The knowledge of such polymorphisms (i.e. their location, as well as, their existence) would be beneficial in identifying disease loci for many disorders, including cancerous diseases and conditions. Such a method is described in U.S. Pat. Nos. 5,858,659 and 5,856,104. The US Patents referenced supra are hereby incorporated by reference in their entirety herein.

[1803] The present invention encompasses polynucleotides of the present invention that are chemically synthesized, or reproduced as peptide nucleic acids (PNA), or according to other methods known in the art. The use of PNAs would serve as the preferred form if the polynucleotides are incorporated onto a solid support, or gene chip. For the purposes of the present invention, a peptide nucleic acid (PNA) is a polyamide type of DNA analog and the monomeric units for adenine, guanine, thymine and cytosine are available commercially (Perceptive Biosystems). Certain components of DNA, such as phosphorus, phosphorus oxides, or deoxyribose derivatives, are not present in PNAs. As disclosed by P. E. Nielsen, M. Egholm, R. H. Berg and O. Buchardt, Science 254, 1497 (1991); and M. Egholm, O. Buchardt, L. Christensen, C. Behrens, S. M. Freier, D. A. Driver, R. H. Berg, S. K. Kim, B. Norden, and P. E. Nielsen, Nature 365, 666 (1993), PNAs bind specifically and tightly to complementary DNA strands and are not degraded by nucleases. In fact, PNA binds more strongly to DNA than DNA itself does. This is probably because there is no electrostatic repulsion between the two strands, and also the polyamide backbone is more flexible. Because of this, PNA/DNA duplexes bind under a wider range of stringency conditions than DNA/DNA duplexes, making it easier to perform multiplex hybridization. Smaller probes can be used than with DNA due to the strong binding. In addition, it is more likely that single base mismatches can be determined with PNA/DNA hybridization because a single mismatch in a PNA/DNA 15-mer lowers the melting point (T.sub.m) by 8°-20° C., vs. 4°-16° C. for the DNA/DNA 15-mer duplex. Also, the absence of charge groups in PNA means that hybridization can be done at low ionic strengths and reduce possible interference by salt during the analysis.

[1804] The present invention is useful for detecting cancer in mammals. In particular the invention is useful during diagnosis of pathological cell proliferative neoplasias which include, but are not limited to: acute myelogenous leukemias including acute monocytic leukemia, acute myeloblastic leukemia, acute promyelocytic leukemia, acute myelomonocytic leukemia, acute erythioleukemia, acute megakaryocytic leukemia, and acute undifferentiated leukemia, etc.; and chronic myelogenous leukemias including chronic myelomonocytic leukemia, chronic granulocytic leukemia, etc. Preferred mammals include monkeys, apes, cats, dogs, cows, pigs, horses, rabbits and humans. Particularly preferred are humans.

[1805] Pathological cell proliferative diseases, disorders, and/or conditions are often associated with inappropriate activation of proto-oncogenes. (Gelmann, E. P. et al., “The Etiology of Acute Leukemia: Molecular Genetics and Viral Oncology,” in Neoplastic Diseases of the Blood, Vol 1., Wiernik, P. H. et al. eds., 161-182 (1985)). Neoplasias are now believed to result from the qualitative alteration of a normal cellular gene product, or from the quantitative modification of gene expression by insertion into the chromosome of a viral sequence, by chromosomal translocation of a gene to a more actively transcribed region, or by some other mechanism. (Gelmann et al., supra) It is likely that mutated or altered expression of specific genes is involved in the pathogenesis of some leukemias, among other tissues and cell types. (Gelmann et al., supra) Indeed, the human counterparts of the oncogenes involved in some animal neoplasias have been amplified or translocated in some cases of human leukemia and carcinoma. (Gelmann et al., supra)

[1806] For example, c-myc expression is highly amplified in the non-lymphocytic leukemia cell line HL-60. When HL-60 cells are chemically induced to stop proliferation, the level of c-myc is found to be downregulated. (International Publication Number WO 91/15580) However, it has been shown that exposure of HL-60 cells to a DNA construct that is complementary to the 5′ end of c-myc or c-myb blocks translation of the corresponding mRNAs which downregulates expression of the c-myc or c-myb proteins and causes arrest of cell proliferation and differentiation of the treated cells. (International Publication Number WO 91/15580; Wickstrom et al., Proc. Natl. Acad. Sci. 85:1028 (1988); Anfossi et al., Proc. Natl. Acad. Sci. 86:3379 (1989)). However, the skilled artisan would appreciate the present invention's usefulness would not be limited to treatment of proliferative diseases, disorders, and/or conditions of hematopoietic cells and tissues, in light of the numerous cells and cell types of varying origins which are known to exhibit proliferative phenotypes.

[1807] In addition to the foregoing, a polynucleotide can be used to control gene expression through triple helix formation or antisense DNA or RNA. Antisense techniques are discussed, for example, in Okano, J. Neurochem. 56: 560 (1991); “Oligodeoxynucleotides as Antisense Inhibitors of Gene Expression, CRCPress, Boca Raton, Fla. (1988). Triple helix formation is discussed in, for instance Lee et al., Nucleic Acids Research 6: 3073 (1979); Cooney et al., Science 241: 456 (1988); and Dervan et al., Science 251: 1360 (1991). Both methods rely on binding of the polynucleotide to a complementary DNA or RNA. For these techniques, preferred polynucleotides are usually oligonucleotides 20 to 40 bases in length and complementary to either the region of the gene involved in transcription (triple helix—see Lee et al., Nucl. Acids Res. 6:3073 (1979); Cooney et al., Science 241:456 (1988); and Dervan et al., Science 251:1360 (1991)) or to the mRNA itself (antisense Okano, J. Neurochem. 56:560 (1991); Oligodeoxy-nucleotides as Antisense Inhibitors of Gene Expression, CRC Press, Boca Raton, Fla. (1988).) Triple helix formation optimally results in a shut-off of RNA transcription from DNA, while antisense RNA hybridization blocks translation of an mRNA molecule into polypeptide. Both techniques are effective in model systems, and the information disclosed herein can be used to design antisense or triple helix polynucleotides in an effort to treat or prevent disease.

[1808] Polynucleotides of the present invention are also useful in gene therapy. One goal of gene therapy is to insert a normal gene into an organism having a defective gene, in an effort to correct the genetic defect. The polynucleotides disclosed in the present invention offer a means of targeting such genetic defects in a highly accurate manner. Another goal is to insert a new gene that was not present in the host genome, thereby producing a new trait in the host cell.

[1809] The polynucleotides are also useful for identifying individuals from minute biological samples. The United States military, for example, is considering the use of restriction fragment length polymorphism (RFLP) for identification of its personnel. In this technique, an individual's genomic DNA is digested with one or more restriction enzymes, and probed on a Southern blot to yield unique bands for identifying personnel. This method does not suffer from the current limitations of “Dog Tags” which can be lost, switched, or stolen, making positive identification difficult. The polynucleotides of the present invention can be used as additional DNA markers for RFLP.

[1810] The polynucleotides of the present invention can also be used as an alternative to RFLP, by determining the actual base-by-base DNA sequence of selected portions of an individual's genome. These sequences can be used to prepare PCR primers for amplifying and isolating such selected DNA, which can then be sequenced. Using this technique, individuals can be identified because each individual will have a unique set of DNA sequences. Once an unique ID database is established for an individual, positive identification of that individual, living or dead, can be made from extremely small tissue samples.

[1811] Forensic biology also benefits from using DNA-based identification techniques as disclosed herein. DNA sequences taken from very small biological samples such as tissues, e.g., hair or skin, or body fluids, e.g., blood, saliva, semen, synovial fluid, amniotic fluid, breast milk, lymph, pulmonary sputum or surfactant, urine, fecal matter, etc., can be amplified using PCR. In one prior art technique, gene sequences amplified from polymorphic loci, such as DQa class II HLA gene, are used in forensic biology to identify individuals. (Erlich, H., PCR Technology, Freeman and Co. (1992).) Once these specific polymorphic loci are amplified, they are digested with one or more restriction enzymes, yielding an identifying set of bands on a Southern blot probed with DNA corresponding to the DQa class II HLA gene. Similarly, polynucleotides of the present invention can be used as polymorphic markers for forensic purposes.

[1812] There is also a need for reagents capable of identifying the source of a particular tissue. Such need arises, for example, in forensics when presented with tissue of unknown origin. Appropriate reagents can comprise, for example, DNA probes or primers specific to particular tissue prepared from the sequences of the present invention. Panels of such reagents can identify tissue by species and/or by organ type. In a similar fashion, these reagents can be used to screen tissue cultures for contamination.

[1813] In the very least, the polynucleotides of the present invention can be used as molecular weight markers on Southern gels, as diagnostic probes for the presence of a specific mRNA in a particular cell type, as a probe to “subtract-out” known sequences in the process of discovering novel polynucleotides, for selecting and making oligomers for attachment to a “gene chip” or other support, to raise anti-DNA antibodies using DNA immunization techniques, and as an. antigen to elicit an immune response.

[1814] Uses of the Polypeptides

[1815] Each of the polypeptides identified herein can be used in numerous ways. The following description should be considered exemplary and utilizes known techniques.

[1816] A polypeptide of the present invention can be used to assay protein levels in a biological sample using antibody-based techniques. For example, protein expression in tissues can be studied with classical immunohistological methods. (Jalkanen, M., et al., J. Cell. Biol. 101:976-985 (1985); Jalkanen, M., et al., J. Cell. Biol. 105:3087-3096 (1987).) Other antibody-based methods useful for detecting protein gene expression include immunoassays, such as the enzyme linked immunosorbent assay (ELISA) and the radioimmunoassay (RIA). Suitable antibody assay labels are known in the art and include enzyme labels, such as, glucose oxidase, and radioisotopes, such as iodine (125I, 121I), carbon (14C), sulfur (35 S), tritium (3H), indium (112In), and technetium (99mTc), and fluorescent labels, such as fluorescein and rhodamine, and biotin.

[1817] In addition to assaying secreted protein levels in a biological sample, proteins can also be detected in vivo by imaging. Antibody labels or markers for in vivo imaging of protein include those detectable by X-radiography, NMR or ESR. For X-radiography, suitable labels include radioisotopes such as barium or cesium, which emit detectable radiation but are not overtly harmful to the subject. Suitable markers for NMR and ESR include those with a detectable characteristic spin, such as deuterium, which may be incorporated into the antibody by labeling of nutrients for the relevant hybridoma.

[1818] A protein-specific antibody or antibody fragment which has been labeled with an appropriate detectable imaging moiety, such as a radioisotope (for example, 131I, 112In, 99mTc), a radio-opaque substance, or a material detectable by nuclear magnetic resonance, is introduced (for example, parenterally, subcutaneously, or intraperitoneally) into the mammal. It will be understood in the art that the size of the subject and the imaging system used will determine the quantity of imaging moiety needed to produce diagnostic images. In the case of a radioisotope moiety, for a human subject, the quantity of radioactivity injected will normally range from about 5 to 20 millicuries of 99 mTc. The labeled antibody or antibody fragment will then preferentially accumulate at the location of cells which contain the specific protein. In vivo tumor imaging is described in S. W. Burchiel et al., “Immunopharmacokinetics of Radiolabeled Antibodies and Their Fragments.” (Chapter 13 in Tumor Imaging: The Radiochemical Detection of Cancer, S. W. Burchiel and B. A. Rhodes, eds., Masson Publishing Inc. (1982).)

[1819] Thus, the invention provides a diagnostic method of a disorder, which involves (a) assaying the expression of a polypeptide of the present invention in cells or body fluid of an individual; (b) comparing the level of gene expression with a standard gene expression level, whereby an increase or decrease in the assayed polypeptide gene expression level compared to the standard expression level is indicative of a disorder. With respect to cancer, the presence of a relatively high amount of transcript in biopsied tissue from an individual may indicate a predisposition for the development of the disease, or may provide a means for detecting the disease prior to the appearance of actual clinical symptoms. A more definitive diagnosis of this type may allow health professionals to employ preventative measures or aggressive treatment earlier thereby preventing the development or further progression of the cancer.

[1820] Moreover, polypeptides of the present invention can be used to treat, prevent, and/or diagnose disease. For example, patients can be administered a polypeptide of the present invention in an effort to replace absent or decreased levels of the polypeptide (e.g., insulin), to supplement absent or decreased levels of a different polypeptide (e.g., hemoglobin S for hemoglobin B, SOD, catalase, DNA repair proteins), to inhibit the activity of a polypeptide (e.g., an oncogene or tumor supressor), to activate the activity of a polypeptide (e.g., by binding to a receptor), to reduce the activity of a membrane bound receptor by competing with it for free ligand (e.g., soluble TNF receptors used in reducing inflammation), or to bring about a desired response (e.g., blood vessel growth inhibition, enhancement of the immune response to proliferative cells or tissues).

[1821] Similarly, antibodies directed to a polypeptide of the present invention can also be used to treat, prevent, and/or diagnose disease. For example, administration of an antibody directed to a polypeptide of the present invention can bind and reduce overproduction of the polypeptide. Similarly, administration of an antibody can activate the polypeptide, such as by binding to a polypeptide bound to a membrane (receptor).

[1822] At the very least, the polypeptides of the present invention can be used as molecular weight markers on SDS-PAGE gels or on molecular sieve gel filtration columns using methods well known to those of skill in the art. Polypeptides can also be used to raise antibodies, which in turn are used to measure protein expression from a recombinant cell, as a way of assessing transformation of the host cell. Moreover, the polypeptides of the present invention can be used to test the following biological activities.

[1823] Gene Therapy Methods

[1824] Another aspect of the present invention is to gene therapy methods for treatingor preventing disorders, diseases and conditions. The gene therapy methods relate to the introduction of nucleic acid (DNA, RNA and antisense DNA or RNA) sequences into an animal to achieve expression of a polypeptide of the present invention. This method requires a polynucleotide which codes for a polypeptide of the invention that operatively linked to a promoter and any other genetic elements necessary for the expression of the polypeptide by the target tissue. Such gene therapy and delivery techniques are known in the art, see, for example, WO90/11092, which is herein incorporated by reference.

[1825] Thus, for example, cells from a patient may be engineered with a polynucleotide (DNA or RNA) comprising a promoter operably linked to a polynucleotide of the invention ex vivo, with the engineered cells then being provided to a patient to be treated with the polypeptide. Such methods are well-known in the art. For example, see Belldegrun et al., J. Natl. Cancer Inst., 85:207-216 (1993); Ferrantini et al., Cancer Research, 53:107-1112 (1993); Ferrantini et al., J. Immunology 153: 4604-4615 (1994); Kaido, T., et al., Int. J. Cancer 60: 221-229 (1995); Ogura et al., Cancer Research 50: 5102-5106 (1990); Santodonato, et al., Human Gene Therapy 7:1-10 (1996); Santodonato, et al., Gene Therapy 4:1246-1255 (1997); and Zhang, et al., Cancer Gene Therapy 3: 31-38 (1996)), which are herein incorporated by reference. In one embodiment, the cells which are engineered are arterial cells. The arterial cells may be reintroduced into the patient through direct injection to the artery, the tissues surrounding the artery, or through catheter injection.

[1826] As discussed in more detail below, the polynucleotide constructs can be delivered by any method that delivers injectable materials to the cells of an animal, such as, injection into the interstitial space of tissues (heart, muscle, skin, lung, liver, and the like). The polynucleotide constructs may be delivered in a pharmaceutically acceptable liquid or aqueous carrier.

[1827] In one embodiment, the polynucleotide of the invention is delivered as a naked polynucleotide. The term “naked” polynucleotide, DNA or RNA refers to sequences that are free from any delivery vehicle that acts to assist, promote or facilitate entry into the cell, including viral sequences, viral particles, liposome formulations, lipofectin or precipitating agents and the like. However, the polynucleotides of the invention can also be delivered in liposome formulations and lipofectin formulations and the like can be prepared by methods well known to those skilled in the art. Such methods are described, for example, in U.S. Pat. Nos. 5,593,972, 5,589,466, and 5,580,859, which are herein incorporated by reference.

[1828] The polynucleotide vector constructs of the invention used in the gene therapy method are preferably constructs that will not integrate into the host genome nor will they contain sequences that allow for replication. Appropriate vectors include pWLNEO, pSV2CAT, pOG44, pXT1 and pSG available from Stratagene; pSVK3, pBPV, pMSG and pSVL available from Pharmacia; and pEF1/V5, pcDNA3.1, and pRc/CMV2 available from Invitrogen. Other suitable vectors will be readily apparent to the skilled artisan.

[1829] Any strong promoter known to those skilled in the art can be used for driving the expression of polynucleotide sequence of the invention. Suitable promoters include adenoviral promoters, such as the adenoviral major late promoter; or heterologous promoters, such as the cytomegalovirus (CMV) promoter; the respiratory syncytial virus (RSV) promoter; inducible promoters, such as the MMT promoter, the metallothionein promoter; heat shock promoters; the albumin promoter; the ApoAI promoter; human globin promoters; viral thymidine kinase promoters, such as the Herpes Simplex thymidine kinase promoter; retroviral LTRs; the b-actin promoter; and human growth hormone promoters. The promoter also may be the native promoter for the polynucleotides of the invention.

[1830] Unlike other gene therapy techniques, one major advantage of introducing naked nucleic acid sequences into target cells is the transitory nature of the polynucleotide synthesis in the cells. Studies have shown that non-replicating DNA sequences can be introduced into cells to provide production of the desired polypeptide for periods of up to six months.

[1831] The polynucleotide construct of the invention can be delivered to the interstitial space of tissues within the an animal, including of muscle, skin, brain, lung, liver, spleen, bone marrow, thymus, heart, lymph, blood, bone, cartilage, pancreas, kidney, gall bladder, stomach, intestine, testis, ovary, uterus, rectum, nervous system, eye, gland, and connective tissue. Interstitial space of the tissues comprises the intercellular, fluid, mucopolysaccharide matrix among the reticular fibers of organ tissues, elastic fibers in the walls of vessels or chambers, collagen fibers of fibrous tissues, or that same matrix within connective tissue ensheathing muscle cells or in the lacunae of bone. It is similarly the space occupied by the plasma of the circulation and the lymph fluid of the lymphatic channels. Delivery to the interstitial space of muscle tissue is preferred for the reasons discussed below. They may be conveniently delivered by injection into the tissues comprising these cells. They are preferably delivered to and expressed in persistent, non-dividing cells which are differentiated, although delivery and expression may be achieved in non-differentiated or less completely differentiated cells, such as, for example, stem cells of blood or skin fibroblasts. In vivo muscle cells are particularly competent in their ability to take up and express polynucleotides.

[1832] For the nakednucleic acid sequence injection, an effective dosage amount of DNA or RNA will be in the range of from about 0.05 mg/kg body weight to about 50 mg/kg body weight. Preferably the dosage will be from about 0.005 mg/kg to about 20 mg/kg and more preferably from about 0.05 mg/kg to about 5 mg/kg. Of course, as the artisan of ordinary skill will appreciate, this dosage will vary according to the tissue site of injection. The appropriate and effective dosage of nucleic acid sequence can readily be determined by those of ordinary skill in the art and may depend on the condition being treated and the route of administration.

[1833] The preferred route of administration is by the parenteral route of injection into the interstitial space of tissues. However, other parenteral routes may also be used, such as, inhalation of an aerosol formulation particularly for delivery to lungs or bronchial tissues, throat or mucous membranes of the nose. In addition, naked DNA constructs can be delivered to arteries during angioplasty by the catheter used in the procedure.

[1834] The naked polynucleotides are delivered by any method known in the art, including, but not limited to, direct needle injection at the delivery site, intravenous injection, topical administration, catheter infusion, and so-called “gene guns”. These delivery methods are known in the art.

[1835] The constructs may also be delivered with delivery vehicles such as viral sequences, viral particles, liposome formulations, lipofectin, precipitating agents, etc. Such methods of delivery are known in the art.

[1836] In certain embodiments, the polynucleotide constructs of the invention are complexed in a liposome preparation. Liposomal preparations for use in the instant invention include cationic (positively charged), anionic (negatively charged) and neutral preparations. However, cationic liposomes are particularly preferred because a tight charge complex can be formed between the cationic liposome and the polyanionic nucleic acid. Cationic liposomes have been shown to mediate intracellular delivery of plasmid DNA (Felgner et al., Proc. Natl. Acad. Sci. USA, 84:7413-7416 (1987), which is herein incorporated by reference); mRNA (Malone et al., Proc. Natl. Acad. Sci. USA, 86:6077-6081 (1989), which is herein incorporated by reference); and purified transcription factors (Debs et al., J. Biol. Chem., 265:10189-10192 (1990), which is herein incorporated by reference), in functional form.

[1837] Cationic liposomes are readily available. For example, N-[1-2,3-dioleyloxy)propyl]-N,N,N-triethylammonium (DOTMA) liposomes are particularly useful and are available under the trademark Lipofectin, from GIBCO BRL, Grand Island, N.Y. (See, also, Felgner et al., Proc. Natl. Acad. Sci. USA, 84:7413-7416 (1987), which is herein incorporated by reference). Other commercially available liposomes include transfectace (DDAB/DOPE) and DOTAP/DOPE (Boehringer).

[1838] Other cationic liposomes can be prepared from readily available materials using techniques well known in the art. See, e.g. PCT Publication NO: WO 90/11092 (which is herein incorporated by reference) for a description of the synthesis of DOTAP (1,2-bis(oleoyloxy)-3-(trimethylammonio)propane) liposomes. Preparation of DOTMA liposomes is explained in the literature, see, e.g., Felgner et al., Proc. Natl. Acad. Sci. USA, 84:7413-7417, which is herein incorporated by reference. Similar methods can be used to prepare liposomes from other cationic lipid materials.

[1839] Similarly, anionic and neutral liposomes are readily available, such as from Avanti Polar Lipids (Birmingham, Ala.), or can be easily prepared using readily available materials. Such materials include phosphatidyl, choline, cholesterol, phosphatidyl ethanolamine, dioleoylphosphatidyl choline (DOPC), dioleoylphosphatidyl glycerol (DOPG), dioleoylphoshatidyl ethanolamine (DOPE), among others. These materials can also be mixed with the DOTMA and DOTAP starting materials in appropriate ratios. Methods for making liposomes using these materials are well known in the art.

[1840] For example, commercially dioleoylphosphatidyl choline (DOPC), dioleoylphosphatidyl glycerol (DOPG), and dioleoylphosphatidyl ethanolamine (DOPE) can be used in various combinations to make conventional liposomes, with or without the addition of cholesterol. Thus, for example, DOPG/DOPC vesicles can be prepared by drying 50 mg each of DOPG and DOPC under a stream of nitrogen gas into a sonication vial. The sample is placed under a vacuum pump overnight and is hydrated the following day with deionized water. The sample is then sonicated for 2 hours in a capped vial, using a Heat Systems model 350 sonicator equipped with an inverted cup (bath type) probe at the maximum setting while the bath is circulated at 15EC. Alternatively, negatively charged vesicles can be prepared without sonication to produce multilamellar vesicles or by extrusion through nucleopore membranes to produce unilamellar vesicles of discrete size. Other methods are known and available to those of skill in the art.

[1841] The liposomes can comprise multilamellar vesicles (MLVs), small unilamellar vesicles (SUVs), or large unilamellar vesicles (LUVs), with SUVs being preferred. The various liposome-nucleic acid complexes are prepared using methods well known in the art. See, e.g., Straubinger et al., Methods of Immunology, 101:512-527 (1983), which is herein incorporated by reference. For example, MLVs containing nucleic acid can be prepared by depositing a thin film of phospholipid on the walls of a glass tube and subsequently hydrating with a solution of the material to be encapsulated. SUVs are prepared by extended sonication of MLVs to produce a homogeneous population of unilamellar liposomes. The material to be entrapped is added to a suspension of preformed MLVs and then sonicated. When using liposomes containing cationic lipids, the dried lipid film is resuspended in an appropriate solution such as sterile water or an isotonic buffer solution such as 10 mM Tris/NaCl, sonicated, and then the preformed liposomes are mixed directly with the DNA. The liposome and DNA form a very stable complex due to binding of the positively charged liposomes to the cationic DNA. SUVs find use with small nucleic acid fragments. LUVs are prepared by a number of methods, well known in the art. Commonly used methods include Ca²⁺-EDTA chelation (Papahadjopoulos et al., Biochim. Biophys. Acta, 394:483 (1975); Wilson et al., Cell, 17:77 (1979)); ether injection (Deamer et al., Biochim. Biophys. Acta, 443:629 (1976); Ostro et al., Biochem. Biophys. Res. Commun., 76:836 (1977); Fraley et al., Proc. Natl. Acad. Sci. USA, 76:3348 (1979)); detergent dialysis (Enoch et al., Proc. Natl. Acad. Sci. USA, 76:145 (1979)); and reverse-phase evaporation (REV) (Fraley et al., J. Biol. Chem., 255:10431 (1980); Szoka et al., Proc. Natl. Acad. Sci. USA, 75:145 (1978); Schaefer-Ridder et al., Science, 215:166 (1982)), which are herein incorporated by reference.

[1842] Generally, the ratio of DNA to liposomes will be from about 10:1 to about 1:10. Preferably, the ration will be from about 5:1 to about 1:5. More preferably, the ration will be about 3:1 to about 1:3. Still more preferably, the ratio will be about 1:1.

[1843] U.S. Pat. No. 5,676,954 (which is herein incorporated by reference) reports on the injection of genetic material, complexed with cationic liposomes carriers, into mice. U.S. Pat. Nos. 4,897,355, 4,946,787, 5,049,386, 5,459,127, 5,589,466, 5,693,622, 5,580,859, 5,703,055, and international publication NO: WO 94/9469 (which are herein incorporated by reference) provide cationic lipids for use in transfecting DNA into cells and mammals. U.S. Pat. Nos. 5,589,466, 5,693,622, 5,580,859, 5,703,055, and international publication NO: WO 94/9469 (which are herein incorporated by reference) provide methods for delivering DNA-cationic lipid complexes to mammals.

[1844] In certain embodiments, cells are engineered, ex vivo or in vivo, using a retroviral particle containing RNA which comprises a sequence encoding polypeptides of the invention. Retroviruses from which the retroviral plasmid vectors may be derived include, but are not limited to, Moloney Murine Leukemia Virus, spleen necrosis virus, Rous sarcoma Virus, Harvey Sarcoma Virus, avian leukosis virus, gibbon ape leukemia virus, human immunodeficiency virus, Myeloproliferative Sarcoma Virus, and mammary tumor virus.

[1845] The retroviral plasmid vector is employed to transduce packaging cell lines to form producer cell lines. Examples of packaging cells which may be transfected include, but are not limited to, the PE501, PA317, R-2, R-AM, PA12, T19-14×, VT-19-17-H2, RCRE, RCRIP, GP+E-86, GP+envAm12, and DAN cell lines as described in Miller, Human Gene Therapy, 1:5-14 (1990), which is incorporated herein by reference in its entirety. The vector may transduce the packaging cells through any means known in the art. Such means include, but are not limited to, electroporation, the use of liposomes, and CaPO₄ precipitation. In one alternative, the retroviral plasmid vector may be encapsulated into a liposome, or coupled to a lipid, and then administered to a host.

[1846] The producer cell line generates infectious retroviral vector particles which include polynucleotide encoding polypeptides of the invention. Such retroviral vector particles then may be employed, to transduce eukaryotic cells, either in vitro or in vivo. The transduced eukaryotic cells will express polypeptides of the invention.

[1847] In certain other embodiments, cells are engineered, ex vivo or in vivo, with polynucleotides of the invention contained in an adenovirus vector. Adenovirus can be manipulated such that it encodes and expresses polypeptides of the invention, and at the same time is inactivated in terms of its ability to replicate in a normal lytic viral life cycle. Adenovirus expression is achieved without integration of the viral DNA into the host cell chromosome, thereby alleviating concerns about insertional mutagenesis. Furthermore, adenoviruses have been used as live enteric vaccines for many years with an excellent safety profile (Schwartzet al., Am. Rev. Respir. Dis., 109:233-238 (1974)). Finally, adenovirus mediated gene transfer has been demonstrated in a number of instances including transfer of alpha-1-antitrypsin and CFTR to the lungs of cotton rats (Rosenfeld et al., Science, 252:431-434 (1991); Rosenfeld et al., Cell, 68:143-155 (1992)). Furthermore, extensive studies to attempt to establish adenovirus as a causative agent in human cancer were uniformly negative (Green et al. Proc. Natl. Acad. Sci. USA, 76:6606 (1979)).

[1848] Suitable adenoviral vectors useful in the present invention are described, for example, in Kozarsky and Wilson, Curr. Opin. Genet. Devel., 3:499-503 (1993); Rosenfeld et al., Cell, 68:143-155 (1992); Engelhardt et al., Human Genet. Ther., 4:759-769 (1993); Yang et al., Nature Genet., 7:362-369 (1994); Wilson et al., Nature, 365:691-692 (1993); and U.S. Pat. No. 5,652,224, which are herein incorporated by reference. For example, the adenovirus vector Ad2 is useful and can be grown in human 293 cells. These cells contain the E1 region of adenovirus and constitutively express E1a and E1b, which complement the defective adenoviruses by providing the products of the genes deleted from the vector. In addition to Ad2, other varieties of adenovirus (e.g., Ad3, Ad5, and Ad7) are also useful in the present invention.

[1849] Preferably, the adenoviruses used in the present invention are replication deficient. Replication deficient adenoviruses require the aid of a helper virus and/or packaging cell line to form infectious particles. The resulting virus is capable of infecting cells and can express a polynucleotide of interest which is operably linked to a promoter, but cannot replicate in most cells. Replication deficient adenoviruses may be deleted in one or more of all or a portion of the following genes: E1a, E1b, E3, E4, E2a, or L1 through L5.

[1850] In certain other embodiments, the cells are engineered, ex vivo or in vivo, using an adeno-associated virus (AAV). AAVs are naturally occurring defective viruses that require helper viruses to produce infectious particles (Muzyczka, Curr. Topics in Microbiol. Immunol., 158:97 (1992)). It is also one of the few viruses that may integrate its DNA into non-dividing cells. Vectors containing as little as 300 base pairs of AAV can be packaged and can integrate, but space for exogenous DNA is limited to about 4.5 kb. Methods for producing and using such AAVs are known in the art. See, for example, U.S. Pat. Nos. 5,139,941, 5,173,414, 5,354,678, 5,436,146, 5,474,935, 5,478,745, and 5,589,377.

[1851] For example, an appropriate AAV vector for use in the present invention will include all the sequences necessary for DNA replication, encapsidation, and host-cell integration. The polynucleotide construct containing polynucleotides of the invention is inserted into the AAV vector using standard cloning methods, such as those found in Sambrook et al., Molecular Cloning: A Laboratory Manual, Cold Spring Harbor Press (1989). The recombinant AAV vector is then transfected into packaging cells which are infected with a helper virus, using any standard technique, including lipofection, electroporation, calcium phosphate precipitation, etc. Appropriate helper viruses include adenoviruses, cytomegaloviruses, vaccinia viruses, or herpes viruses. Once the packaging cells are transfected and infected, they will produce infectious AAV viral particles which contain the polynucleotide construct of the invention. These viral particles are then used to transduce eukaryotic cells, either ex vivo or in vivo. The transduced cells will contain the polynucleotide construct integrated into its genome, and will express the desired gene product.

[1852] Another method of gene therapy involves operably associating heterologous control regions and endogenous polynucleotide sequences (e.g. encoding the polypeptide sequence of interest) via homologous recombination (see, e.g., U.S. Pat. No. 5,641,670, issued Jun. 24, 1997; International Publication NO: WO 96/29411, published Sep. 26, 1996; International Publication NO: WO 94/12650, published Aug. 4, 1994; Koller et al., Proc. Natl. Acad. Sci. USA, 86:8932-8935 (1989); and Zijlstra et al., Nature, 342:435-438 (1989). This method involves the activation of a gene which is present in the target cells, but which is not normally expressed in the cells, or is expressed at a lower level than desired.

[1853] Polynucleotide constructs are made, using standard techniques known in the art, which contain the promoter with targeting sequences flanking the promoter. Suitable promoters are described herein. The targeting sequence is sufficiently complementary to an endogenous sequence to permit homologous recombination of the promoter-targeting sequence with the endogenous sequence. The targeting sequence will be sufficiently near the 5′ end of the desired endogenous polynucleotide sequence so the promoter will be operably linked to the endogenous sequence upon homologous recombination.

[1854] The promoter and the targeting sequences can be amplified using PCR. Preferably, the amplified promoter contains distinct restriction enzyme sites on the 5′ and 3′ ends. Preferably, the 3′ end of the first targeting sequence contains the same restriction enzyme site as the 5′ end of the amplified promoter and the 5′ end of the second targeting sequence contains the same restriction site as the 3′ end of the amplified promoter. The amplified promoter and targeting sequences are digested and ligated together.

[1855] The promoter-targeting sequence construct is delivered to the cells, either as naked polynucleotide, or in conjunction with transfection-facilitating agents, such as liposomes, viral sequences, viral particles, whole viruses, lipofection, precipitating agents, etc., described in more detail above. The P promoter-targeting sequence can be delivered by any method, included direct needle injection, intravenous injection, topical administration, catheter infusion, particle accelerators, etc. The methods are described in more detail below.

[1856] The promoter-targeting sequence construct is taken up by cells. Homologous recombination between the construct and the endogenous sequence takes place, such that an endogenous sequence is placed under the control of the promoter. The promoter then drives the expression of the endogenous sequence.

[1857] The polynucleotides encoding polypeptides of the present invention may be administered along with other polynucleotides encoding other angiongenic proteins. Angiogenic proteins include, but are not limited to, acidic and basic fibroblast growth factors, VEGF-1, VEGF-2 (VEGF-C), VEGF-3 (VEGF-B), epidermal growth factor alpha and beta, platelet-derived endothelial cell growth factor, platelet-derived growth factor, tumor necrosis factor alpha, hepatocyte growth factor, insulin like growth factor, colony stimulating factor, macrophage colony stimulating factor, granulocyte/macrophage colony stimulating factor, and nitric oxide synthase.

[1858] Preferably, the polynucleotide encoding a polypeptide of the invention contains a secretory signal sequence that facilitates secretion of the protein. Typically, the signal sequence is positioned in the coding region of the polynucleotide to be expressed towards or at the 5′ end of the coding region. The signal sequence may be homologous or heterologous to the polynucleotide of interest and may be homologous or heterologous to the cells to be transfected. Additionally, the signal sequence may be chemically synthesized using methods known in the art.

[1859] Any mode of administration of any of the above-described polynucleotides constructs can be used so long as the mode results in the expression of one or more molecules in an amount sufficient to provide a therapeutic effect. This includes direct needle injection, systemic injection, catheter infusion, biolistic injectors, particle accelerators (i.e., “gene guns”), gelfoam sponge depots, other commercially available depot materials, osmotic pumps (e.g., Alza minipumps), oral or suppositorial solid (tablet or pill) pharmaceutical formulations, and decanting or topical applications during surgery. For example, direct injection of naked calcium phosphate-precipitated plasmid into rat liver and rat spleen or a protein-coated plasmid into the portal vein has resulted in gene expression of the foreign gene in the rat livers. (Kaneda et al., Science, 243:375 (1989)).

[1860] A preferred method of local administration is by direct injection. Preferably, a recombinant molecule of the present invention complexed with a delivery vehicle is administered by direct injection into or locally within the area of arteries. Administration of a composition locally within the area of arteries refers to injecting the composition centimeters and preferably, millimeters within arteries.

[1861] Another method of local administration is to contact a polynucleotide construct of the present invention in or around a surgical wound. For example, a patient can undergo surgery and the polynucleotide construct can be coated on the surface of tissue inside the wound or the construct can be injected into areas of tissue inside the wound.

[1862] Therapeutic compositions useful in systemic administration, include recombinant molecules of the present invention complexed to a targeted delivery vehicle of the present invention. Suitable delivery vehicles for use with systemic administration comprise liposomes comprising ligands for targeting the vehicle to a particular site.

[1863] Preferred methods of systemic administration, include intravenous injection, aerosol, oral and percutaneous (topical) delivery. Intravenous injections can be performed using methods standard in the art. Aerosol delivery can also be performed using methods standard in the art (see, for example, Stribling et al., Proc. Natl. Acad. Sci. USA, 189:11277-11281 (1992), which is incorporated herein by reference). Oral delivery can be performed by complexing a polynucleotide construct of the present invention to a carrier capable of withstanding degradation by digestive enzymes in the gut of an animal. Examples of such carriers, include plastic capsules or tablets, such as those known in the art. Topical delivery can be performed by mixing a polynucleotide construct of the present invention with a lipophilic reagent (e.g., DMSO) that is capable of passing into the skin.

[1864] Determining an effective amount of substance to be delivered can depend upon a number of factors including, for example, the chemical structure and biological activity of the substance, the age and weight of the animal, the precise condition requiring treatment and its severity, and the route of administration. The frequency of treatments depends upon a number of factors, such as the amount of polynucleotide constructs administered per dose, as well as the health and history of the subject. The precise amount, number of doses, and timing of doses will be determined by the attending physician or veterinarian. Therapeutic compositions of the present invention can be administered to any animal, preferably to mammals and birds. Preferred mammals include humans, dogs, cats, mice, rats, rabbits sheep, cattle, horses and pigs, with humans being particularly

[1865] Biological Activities

[1866] The polynucleotides or polypeptides, or agonists or antagonists of the present invention can be used in assays to test for one or more biological activities. If these polynucleotides and polypeptides do exhibit activity in a particular assay, it is likely that these molecules may be involved in the diseases associated with the biological activity. Thus, the polynucleotides or polypeptides, or agonists or antagonists could be used to treat the associated disease.

[1867] Polynucleotides, translation products and antibodies corresponding to this gene may be useful for the diagnosis, prognosis, prevention, and/or treatment of diseases and/or disorders associated with the following systems.

[1868] Immune Activity

[1869] Polynucleotides, polypeptides, antibodies, and/or agonists or antagonists of the present invention may be useful in treating, preventing, diagnosing and/or prognosing diseases, disorders, and/or conditions of the immune system, by, for example, activating or inhibiting the proliferation, differentiation, or mobilization (chemotaxis) of immune cells. Immune cells develop through a process called hematopoiesis, producing myeloid (platelets, red blood cells, neutrophils, and macrophages) and lymphoid (B and T lymphocytes) cells from pluripotent stem cells. The etiology of these immune diseases, disorders, and/or conditions may be genetic, somatic, such as cancer and some autoimmune diseases, acquired (e.g., by chemotherapy or toxins), or infectious. Moreover, polynucleotides, polypeptides, antibodies, and/or agonists or antagonists of the present invention can be used as a marker or detector of a particular immune system disease or disorder.

[1870] In another embodiment, a polypeptide of the invention, or polynucleotides, antibodies, agonists, or antagonists corresponding to that polypeptide, may be used to treat diseases and disorders of the immune system and/or to inhibit or enhance an immune response generated by cells associated with the tissue(s) in which the polypeptide of the invention is expressed, including one, two, three, four, five, or more tissues disclosed in the “FEATURES OF PROTEIN” section for each gene.

[1871] Polynucleotides, polypeptides, antibodies, and/or agonists or antagonists of the present invention may be useful in treating, preventing, diagnosing, and/or prognosing immunodeficiencies, including both congenital and acquired immunodeficiencies. Examples of B cell immunodeficiencies in which immunoglobulin levels B cell function and/or B cell numbers are decreased include: X-linked agammaglobulinemia (Bruton's disease), X-linked infantile agammaglobulinemia, X-linked immunodeficiency with hyper IgM, non X-linked immunodeficiency with hyper IgM, X-linked lymphoproliferative syndrome (XLP), agammaglobulinemia including congenital and acquired agammaglobulinemia, adult onset agammaglobulinemia, late-onset agammaglobulinemia, dysgammaglobulinemia, hypogammaglobulinemia, unspecified hypogammaglobulinemia, recessive agammaglobulinemia (Swiss type), Selective IgM deficiency, selective IgA deficiency, selective IgG subclass deficiencies, IgG subclass deficiency (with or without IgA deficiency), Ig deficiency with increased IgM, IgG and IgA deficiency with increased IgM, antibody deficiency with normal or elevated Igs, Ig heavy chain deletions, kappa chain deficiency, B cell lymphoproliferative disorder (BLPD), common variable immunodeficiency (CVID), common variable immunodeficiency (CVI) (acquired), and transient bypogammaglobulinemia of infancy.

[1872] In specific embodiments, ataxia-telangiectasia or conditions associated with ataxia-telangiectasia are treated, prevented, diagnosed, and/or prognosing using the polypeptides or polynucleotides of the invention, and/or agonists or antagonists thereof.

[1873] Examples of congenital immunodeficiencies in which T cell and/or B cell function and/or number is decreased include, but are not limited to: DiGeorge anomaly, severe combined immunodeficiencies (SCID) (including, but not limited to, X-linked SCID, autosomal recessive SCID, adenosine deaminase deficiency, purine nucleoside phosphorylase (PNP) deficiency, Class II MHC deficiency (Bare lymphocyte syndrome), Wiskott-Aldrich syndrome, and ataxia telangiectasia), thymic hypoplasia, third and fourth pharyngeal pouch syndrome, 22q11.2 deletion, chronic mucocutaneous candidiasis, natural killer cell deficiency (NK), idiopathic CD4⁺ T-lymphocytopenia, immunodeficiency with predominant T cell defect (unspecified), and unspecified immunodeficiency of cell mediated immunity.

[1874] In specific embodiments, DiGeorge anomaly or conditions associated with DiGeorge anomaly are treated, prevented, diagnosed, and/or prognosed using polypeptides or polynucleotides of the invention, or antagonists or agonists thereof.

[1875] Other immunodeficiencies that may be treated, prevented, diagnosed, and/or prognosed using polypeptides or polynucleotides of the invention, and/or agonists or antagonists thereof, include, but are not limited to, chronic granulomatous disease, Chediak-Higashi syndrome, myeloperoxidase deficiency, leukocyte glucose-6-phosphate dehydrogenase deficiency, X-linked lymphoproliferative syndrome (XLP), leukocyte adhesion deficiency, complement component deficiencies (including C1, C2, C3, C4, C5, C6, C7, C8 and/or C9 deficiencies), reticular dysgenesis, thymic alymphoplasia-aplasia, immunodeficiency with thymoma, severe congenital leukopenia, dysplasia with immunodeficiency, neonatal neutropenia, short limbed dwarfism, and Nezelof syndrome-combined immunodeficiency with Igs.

[1876] In a preferred embodiment, the immunodeficiencies and/or conditions associated with the immunodeficiencies recited above are treated, prevented, diagnosed and/or prognosed using polynucleotides, polypeptides, antibodies, and/or agonists or antagonists of the present invention.

[1877] In a preferred embodiment polynucleotides, polypeptides, antibodies, and/or agonists or antagonists of the present invention could be used as an agent to boost immunoresponsiveness among immunodeficient individuals. In specific embodiments, polynucleotides, polypeptides, antibodies, and/or agonists or antagonists of the present invention could be used as an agent to boost immunoresponsiveness among B cell and/or T cell immunodeficient individuals.

[1878] The polynucleotides, polypeptides, antibodies, and/or agonists or antagonists of the present invention may be useful in treating, preventing, diagnosing and/or prognosing autoimmune disorders. Many autoimmune disorders result from inappropriate recognition of self as foreign material by immune cells. This inappropriate recognition results in an immune response leading to the destruction of the host tissue. Therefore, the administration of polynucleotides and polypeptides of the invention that can inhibit an immune response, particularly the proliferation, differentiation, or chemotaxis of T-cells, may be an effective therapy in preventing autoimmune disorders.

[1879] Autoimmune diseases or disorders that may be treated, prevented, diagnosed and/or prognosed by polynucleotides, polypeptides, antibodies, and/or agonists or antagonists of the present invention include, but are not limited to, one or more of the following: systemic lupus erythematosus, rheumatoid arthritis, ankylosing spondylitis, multiple sclerosis, autoimmune thyroiditis, Hashimoto's thyroiditis, autoimmune hemolytic anemia, hemolytic anemia, thrombocytopenia, autoimmune thrombocytopenia purpura, autoimmune neonatal thrombocytopenia, idiopathic thrombocytopenia purpura, purpura (e.g., Henloch-Scoenlein purpura), autoimmunocytopenia, Goodpasture's syndrome, Pemphigus vulgaris, myasthenia gravis, Grave's disease (hyperthyroidism), and insulin-resistant diabetes mellitus.

[1880] Additional disorders that are likely to have an autoimmune component that may be treated, prevented, and/or diagnosed with the compositions of the invention include, but are not limited to, type II collagen-induced arthritis, antiphospholipid syndrome, dermatitis, allergic encephalomyelitis, myocarditis, relapsing polychondritis, rheumatic heart disease, neuritis, uveitis ophthalmia, polyendocrinopathies, Reiter's Disease, Stiff-Man Syndrome, autoimmune pulmonary inflammation, autism, Guillain-Barre Syndrome, insulin dependent diabetes mellitus, and autoimmune inflammatory eye disorders.

[1881] Additional disorders that are likely to have an autoimmune component that may be treated, prevented, diagnosed and/or prognosed with the compositions of the invention include, but are not limited to, scleroderma with anti-collagen antibodies (often characterized, e.g., by nucleolar and other nuclear antibodies), mixed connective tissue disease (often characterized, e.g., by antibodies to extractable nuclear antigens (e.g., ribonucleoprotein)), polymyositis (often characterized, e.g., by nonhistone ANA), pernicious anemia (often characterized, e.g., by antiparietal cell, microsomes, and intrinsic factor antibodies), idiopathic Addison's disease (often characterized, e.g., by humoral and cell-mediated adrenal cytotoxicity, infertility (often characterized, e.g., by antispermatozoal antibodies), glomerulonephritis (often characterized, e.g., by glomerular basement membrane antibodies or immune complexes), bullous pemphigoid (often characterized, e.g., by IgG and complement in basement membrane), Sjogren's syndrome (often characterized, e.g., by multiple tissue antibodies, and/or a specific nonhistone ANA (SS-B)), diabetes mellitus (often characterized, e.g., by cell-mediated and humoral islet cell antibodies), and adrenergic drug resistance (including adrenergic drug resistance with asthma or cystic fibrosis) (often characterized, e.g., by beta-adrenergic receptor antibodies).

[1882] Additional disorders that may have an autoimmune component that may be treated, prevented, diagnosed and/or prognosed with the compositions of the invention include, but are not limited to, chronic active hepatitis (often characterized, e.g., by smooth muscle antibodies), primary biliary cirrhosis (often characterized, e.g., by mitochondria antibodies), other endocrine gland failure (often characterized, e.g., by specific tissue antibodies in some cases), vitiligo (often characterized, e.g., by melanocyte antibodies), vasculitis (often characterized, e.g., by Ig and complement in vessel walls and/or low serum complement), post-MI (often characterized, e.g., by myocardial antibodies), cardiotomy syndrome (often characterized, e.g., by myocardial antibodies), urticaria (often characterized, e.g., by IgG and IgM antibodies to IgE), atopic dermatitis (often characterized, e.g., by IgG and IgM antibodies to IgE), asthma (often characterized, e.g., by IgG and IgM antibodies to IgE), and many other inflammatory, granulomatous, degenerative, and atrophic disorders.

[1883] In a preferred embodiment, the autoimmune diseases and disorders and/or conditions associated with the diseases and disorders recited above are treated, prevented, diagnosed and/or prognosed using for example, antagonists or agonists, polypeptides or polynucleotides, or antibodies of the present invention. In a specific preferred embodiment, rheumatoid arthritis is treated, prevented, and/or diagnosed using polynucleotides, polypeptides, antibodies, and/or agonists or antagonists of the present invention.

[1884] In another specific preferred embodiment, systemic lupus erythematosus is treated, prevented, and/or diagnosed using polynucleotides, polypeptides, antibodies, and/or agonists or antagonists of the present invention. In another specific preferred embodiment, idiopathic thrombocytopenia purpura is treated, prevented, and/or diagnosed using polynucleotides, polypeptides, antibodies, and/or agonists or antagonists of the present invention.

[1885] In another specific preferred embodiment IgA nephropathy is treated, prevented, and/or diagnosed using polynucleotides, polypeptides, antibodies, and/or agonists or antagonists of the present invention.

[1886] In a preferred embodiment, the autoimmune diseases and disorders and/or conditions associated with the diseases and disorders recited above are treated, prevented, diagnosed and/or prognosed using polynucleotides, polypeptides, antibodies, and/or agonists or antagonists of the present invention In preferred embodiments, polypeptides, antibodies, polynucleotides and/or agonists or antagonists of the present invention are used as a immunosuppressive agent(s).

[1887] Polynucleotides, polypeptides, antibodies, and/or agonists or antagonists of the present invention may be useful in treating, preventing, prognosing, and/or diagnosing diseases, disorders, and/or conditions of hematopoietic cells. Polynucleotides, polypeptides, antibodies, and/or agonists or antagonists of the present invention could be used to increase differentiation and proliferation of hematopoietic cells, including the pluripotent stem cells, in an effort to treat or prevent those diseases, disorders, and/or conditions associated with a decrease in certain (or many) types hematopoietic cells, including but not limited to, leukopenia, neutropenia, anemia, and thrombocytopenia. Alternatively, Polynucleotides, polypeptides, antibodies, and/or agonists or antagonists of the present invention could be used to increase differentiation and proliferation of hematopoietic cells, including the pluripotent stem cells, in an effort to treat or prevent those diseases, disorders, and/or conditions associated with an increase in certain (or many) types of hematopoietic cells, including but not limited to, histiocytosis.

[1888] Allergic reactions and conditions, such as asthma (particularly allergic asthma) or other respiratory problems, may also be treated, prevented, diagnosed and/or prognosed using polypeptides, antibodies, or polynucleotides of the invention, and/or agonists or antagonists thereof. Moreover, these molecules can be used to treat, prevent, prognose, and/or diagnose anaphylaxis, hypersensitivity to an antigenic molecule, or blood group incompatibility.

[1889] Additionally, polypeptides or polynucleotides of the invention, and/or agonists or antagonists thereof, may be used to treat, prevent, diagnose and/or prognose IgE-mediated allergic reactions. Such allergic reactions include, but are not limited to, asthma, rhinitis, and eczema. In specific embodiments, polynucleotides, polypeptides, antibodies, and/or agonists or antagonists of the present invention may be used to modulate IgE concentrations in vitro or in vivo.

[1890] Moreover, polynucleotides, polypeptides, antibodies, and/or agonists or antagonists of the present invention have uses in the diagnosis, prognosis, prevention, and/or treatment of inflammatory conditions. For example, since polypeptides, antibodies, or polynucleotides of the invention, and/or agonists or antagonists of the invention may inhibit the activation, proliferation and/or differentiation of cells involved in an inflammatory response, these molecules can be used to prevent and/or treat chronic and acute inflammatory conditions. Such inflammatory conditions include, but are not limited to, for example, inflammation associated with infection (e.g., septic shock, sepsis, or systemic inflammatory response syndrome), ischemia-reperfusion injury, endotoxin lethality, complement-mediated hyperacute rejection, nephritis, cytokine or chemokine induced lung injury, inflammatory bowel disease, Crohn's disease, over production of cytokines (e.g., TNF or IL-1.), respiratory disorders (e.g., asthma and allergy); gastrointestinal disorders (e.g., inflammatory bowel disease); cancers (e.g., gastric, ovarian, lung, bladder, liver, and breast); CNS disorders (e.g., multiple sclerosis; ischemic brain injury and/or stroke, traumatic brain injury, neurodegenerative disorders (e.g., Parkinson's disease and Alzheimer's disease); AIDS-related dementia; and prion disease); cardiovascular disorders (e.g., atherosclerosis, myocarditis, cardiovascular disease, and cardiopulmonary bypass complications); as well as many additional diseases, conditions, and disorders that are characterized by inflammation (e.g., hepatitis, rheumatoid arthritis, gout, trauma, pancreatitis, sarcoidosis, dernatitis, renal ischemia-reperfusion injury, Grave's disease, systemic lupus erythematosus, diabetes mellitus, and allogenic transplant rejection).

[1891] Because inflammation is a fundamental defense mechanism, inflammatory disorders can effect virtually any tissue of the body. Accordingly, polynucleotides, polypeptides, and antibodies of the invention, as well as agonists or antagonists thereof, have uses in the treatment of tissue-specific inflammatory disorders, including, but not limited to, adrenalitis, alveolitis, angiocholecystitis, appendicitis, balanitis, blepharitis, bronchitis, bursitis, carditis, cellulitis, cervicitis, cholecystitis, chorditis, cochlitis, colitis, conjunctivitis, cystitis, dermatitis, diverticulitis, encephalitis, endocarditis, esophagitis, eustachitis, fibrositis, folliculitis, gastritis, gastroenteritis, gingivitis, glossitis, hepatosplenitis, keratitis, labyrinthitis, laryngitis, lymphangitis, mastitis, media otitis, meningitis, metritis, mucitis, myocarditis, myosititis, myringitis, nephritis, neuritis, orchitis, osteochondritis, otitis, pericarditis, peritendonitis, peritonitis, pharyngitis, phlebitis, poliomyelitis, prostatitis, pulpitis, retinitis, rhinitis, salpingitis, scleritis, sclerochoroiditis, scrotitis, sinusitis, spondylitis, steatitis, stomatitis, synovitis, syringitis, tendonitis, tonsillitis, urethritis, and vaginitis.

[1892] In specific embodiments, polypeptides, antibodies, or polynucleotides of the invention, and/or agonists or antagonists thereof, are useful to diagnose, prognose, prevent, and/or treat organ transplant rejections and graft-versus-host disease. Organ rejection occurs by host immune cell destruction of the transplanted tissue through an immune response. Similarly, an immune response is also involved in GVHD, but, in this case, the foreign transplanted immune cells destroy the host tissues. Polypeptides, antibodies, or polynucleotides of the invention, and/or agonists or antagonists thereof, that inhibit an immune response, particularly the activation, proliferation, differentiation, or chemotaxis of T-cells, may be an effective therapy in preventing organ rejection or GVHD. In specific embodiments, polypeptides, antibodies, or polynucleotides of the invention, and/or agonists or antagonists thereof, that inhibit an immune response, particularly the activation, proliferation, differentiation, or chemotaxis of T-cells, may be an effective therapy in preventing experimental allergic and hyperacute xenograft rejection.

[1893] In other embodiments, polypeptides, antibodies, or polynucleotides of the invention, and/or agonists or antagonists thereof, are useful to diagnose, prognose, prevent, and/or treat immune complex diseases, including, but not limited to, serum sickness, post streptococcal glomerulonephritis, polyarteritis nodosa, and immune complex-induced vasculitis.

[1894] Polypeptides, antibodies, polynucleotides and/or agonists or antagonists of the invention can be used to treat, detect, and/or prevent infectious agents. For example, by increasing the immune response, particularly increasing the proliferation activation and/or differentiation of B and/or T cells, infectious diseases may be treated, detected, and/or prevented. The immune response may be increased by either enhancing an existing immune response, or by initiating a new immune response. Alternatively, polynucleotides, polypeptides, antibodies, and/or agonists or antagonists of the present invention may also directly inhibit the infectious agent (refer to section of application listing infectious agents, etc), without necessarily eliciting an immune response.

[1895] In another embodiment, polypeptides, antibodies, polynucleotides and/or agonists or antagonists of the present invention are used as a vaccine adjuvant that enhances immune responsiveness to an antigen. In a specific embodiment, polypeptides, antibodies, polynucleotides and/or agonists or antagonists of the present invention are used as an adjuvant to enhance tumor-specific immune responses.

[1896] In another specific embodiment, polypeptides, antibodies, polynucleotides and/or agonists or antagonists of the present invention are used as an adjuvant to enhance anti-viral immune responses. Anti-viral immune responses that may be enhanced using the compositions of the invention as an adjuvant, include virus and virus associated diseases or symptoms described herein or otherwise known in the art. In specific embodiments, the compositions of the invention are used as an adjuvant to enhance an immune response to a virus, disease, or symptom selected from the group consisting of: AIDS, meningitis, Dengue, EBV, and hepatitis (e.g., hepatitis B). In another specific embodiment, the compositions of the invention are used as an adjuvant to enhance an immune response to a virus, disease, or symptom selected from the group consisting of: HIV/AIDS, respiratory syncytial virus, Dengue, rotavirus, Japanese B encephalitis, influenza A and B, parainfluenza, measles, cytomegalovirus, rabies, Junin, Chikungunya, Rift Valley Fever, herpes simplex, and yellow fever.

[1897] In another specific embodiment, polypeptides, antibodies, polynucleotides and/or agonists or antagonists of the present invention are used as an adjuvant to enhance anti-bacterial or anti-fungal immune responses. Anti-bacterial or anti-fungal immune responses that may be enhanced using the compositions of the invention as an adjuvant, include bacteria or fungus and bacteria or fungus associated diseases or symptoms described herein or otherwise known in the art. In specific embodiments, the compositions of the invention are used as an adjuvant to enhance an immune response to a bacteria or fungus, disease, or symptom selected from the group consisting of: tetanus, Diphtheria, botulism, and meningitis type B.

[1898] In another specific embodiment, the compositions of the invention are used as an adjuvant to enhance an immune response to a bacteria or fungus, disease, or symptom selected from the group consisting of: Vibrio cholerae, Mycobacterium leprae, Salmonella typhi, Salmonella paratyphi, Meisseria meningitidis, Streptococcus pneumoniae, Group B streptococcus, Shigella spp., Enterotoxigenic Escherichia coli, Enterohemorrhagic E. coli, and Borrelia burgdorferi.

[1899] In another specific embodiment, polypeptides, antibodies, polynucleotides and/or agonists or antagonists of the present invention are used as an adjuvant to enhance anti-parasitic immune responses. Anti-parasitic immune responses that may be enhanced using the compositions of the invention as an adjuvant, include parasite and parasite associated diseases or symptoms described herein or otherwise known in the art. In specific embodiments, the compositions of the invention are used as an adjuvant to enhance an immune response to a parasite. In another specific embodiment, the compositions of the invention are used as an adjuvant to enhance an immune response to Plasmodium (malaria) or Leishmania.

[1900] In another specific embodiment, polypeptides, antibodies, polynucleotides and/or agonists or antagonists of the present invention may also be employed to treat infectious diseases including silicosis, sarcoidosis, and idiopathic pulmonary fibrosis; for example, by preventing the recruitment and activation of mononuclear phagocytes.

[1901] In another specific embodiment, polypeptides, antibodies, polynucleotides and/or agonists or antagonists of the present invention are used as an antigen for the generation of antibodies to inhibit or enhance immune mediated responses against polypeptides of the invention.

[1902] In one embodiment, polypeptides, antibodies, polynucleotides and/or agonists or antagonists of the present invention are administered to an animal (e.g., mouse, rat, rabbit, hamster, guinea pig, pigs, micro-pig, chicken, camel, goat, horse, cow, sheep, dog, cat, non-human primate, and human, most preferably human) to boost the immune system to produce increased quantities of one or more antibodies (e.g., IgG, IgA, IgM, and IgE), to induce higher affinity antibody production and immunoglobulin class switching (e.g., IgG, IgA, IgM, and IgE), and/or to increase an immune response.

[1903] In another specific embodiment, polypeptides, antibodies, polynucleotides and/or agonists or antagonists of the present invention are used as a stimulator of B cell responsiveness to pathogens.

[1904] In another specific embodiment, polypeptides, antibodies, polynucleotides and/or agonists or antagonists of the present invention are used as an activator of T cells.

[1905] In another specific embodiment, polypeptides, antibodies, polynucleotides and/or agonists or antagonists of the present invention are used as an agent that elevates the immune status of an individual prior to their receipt of immunosuppressive therapies.

[1906] In another specific embodiment, polypeptides, antibodies, polynucleotides and/or agonists or antagonists of the present invention are used as an agent to induce higher affinity antibodies.

[1907] In another specific embodiment, polypeptides, antibodies, polynucleotides and/or agonists or antagonists of the present invention are used as an agent to increase serum immunoglobulin concentrations.

[1908] In another specific embodiment, polypeptides, antibodies, polynucleotides and/or agonists or antagonists of the present invention are used as an agent to accelerate recovery of immunocompromised individuals.

[1909] In another specific embodiment, polypeptides, antibodies, polynucleotides and/or agonists or antagonists of the present invention are used as an agent to boost immunoresponsiveness among aged populations and/or neonates.

[1910] In another specific embodiment, polypeptides, antibodies, polynucleotides and/or agonists or antagonists of the present invention are used as an immune system enhancer prior to, during, or after bone marrow transplant and/or other transplants (e.g., allogeneic or xenogeneic organ transplantation). With respect to transplantation, compositions of the invention may be administered prior to, concomitant with, and/or after transplantation. In a specific embodiment, compositions of the invention are administered after transplantation, prior to the beginning of recovery of T-cell populations. In another specific embodiment, compositions of the invention are first administered after transplantation after the beginning of recovery of T cell populations, but prior to full recovery of B cell populations.

[1911] In another specific embodiment, polypeptides, antibodies, polynucleotides and/or agonists or antagonists of the present invention are used as an agent to boost immunoresponsiveness among individuals having an acquired loss of B cell function. Conditions resulting in an acquired loss of B cell function that may be ameliorated or treated by administering the polypeptides, antibodies, polynucleotides and/or agonists or antagonists thereof, include, but are not limited to, HIV Infection, AIDS, bone marrow transplant, and B cell chronic lymphocytic leukemia (CLL).

[1912] In another specific embodiment, polypeptides, antibodies, polynucleotides and/or agonists or antagonists of the present invention are used as an agent to boost immunoresponsiveness among individuals having a temporary immune deficiency. Conditions resulting in a temporary immune deficiency that may be ameliorated or treated by administering the polypeptides, antibodies, polynucleotides and/or agonists or antagonists thereof, include, but are not limited to, recovery from viral infections (e.g., influenza), conditions associated with malnutrition, recovery from infectious mononucleosis, or conditions associated with stress, recovery from measles, recovery from blood transfusion, and recovery from surgery.

[1913] In another specific embodiment, polypeptides, antibodies, polynucleotides and/or agonists or antagonists of the present invention are used as a regulator of antigen presentation by monocytes, dendritic cells, and/or B-cells. In one embodiment, polynucleotides, polypeptides, antibodies, and/or agonists or antagonists of the present invention enhance antigen presentation or antagonizes antigen presentation in vitro or in vivo. Moreover, in related embodiments, said enhancement or antagonism of antigen presentation may be useful as an anti-tumor treatment or to modulate the immune system.

[1914] In another specific embodiment, polypeptides, antibodies, polynucleotides and/or agonists or antagonists of the present invention are used as an agent to direct an individual's immune system towards development of a humoral response (i.e. TH2) as opposed to a TH1 cellular response.

[1915] In another specific embodiment, polypeptides, antibodies, polynucleotides and/or agonists or antagonists of the present invention are used as a means to induce tumor proliferation and thus make it more susceptible to anti-neoplastic agents. For example, multiple myeloma is a slowly dividing disease and is thus refractory to virtually all anti-neoplastic regimens. If these cells were forced to proliferate more rapidly their susceptibility profile would likely change.

[1916] In another specific embodiment, polypeptides, antibodies, polynucleotides and/or agonists or antagonists of the present invention are used as a stimulator of B cell production in pathologies such as AIDS, chronic lymphocyte disorder and/or Common Variable Immunodificiency.

[1917] In another specific embodiment, polypeptides, antibodies, polynucleotides and/or agonists or antagonists of the present invention are used as a therapy for generation and/or regeneration of lymphoid tissues following surgery, trauma or genetic defect. In another specific embodiment, polypeptides, antibodies, polynucleotides and/or agonists or antagonists of the present invention are used in the pretreatment of bone marrow samples prior to transplant.

[1918] In another specific embodiment, polypeptides, antibodies, polynucleotides and/or agonists or antagonists of the present invention are used as a gene-based therapy for genetically inherited disorders resulting in immuno-incompetence/immunodeficiency such as observed among SCID patients.

[1919] In another specific embodiment, polypeptides, antibodies, polynucleotides and/or agonists or antagonists of the present invention are used as a means of activating monocytes/macrophages to defend against parasitic diseases that effect monocytes such as Leishmania.

[1920] In another specific embodiment, polypeptides, antibodies, polynucleotides and/or agonists or antagonists of the present invention are used as a means of regulating secreted cytokines that are elicited by polypeptides of the invention.

[1921] In another embodiment, polypeptides, antibodies, polynucleotides and/or agonists or antagonists of the present invention are used in one or more of the applications decribed herein, as they may apply to veterinary medicine.

[1922] In another specific embodiment, polypeptides, antibodies, polynucleotides and/or agonists or antagonists of the present invention are used as a means of blocking various aspects of immune responses to foreign agents or self. Examples of diseases or conditions in which blocking of certain aspects of immune responses may be desired include autoimmune disorders such as lupus, and arthritis, as well as immunoresponsiveness to skin allergies, inflammation, bowel disease, injury and diseases/disorders associated with pathogens.

[1923] In another specific embodiment, polypeptides, antibodies, polynucleotides and/or agonists or antagonists of the present invention are used as a therapy for preventing the B cell proliferation and Ig secretion associated with autoimmune diseases such as idiopathic thrombocytopenic purpura, systemic lupus erythematosus and multiple sclerosis.

[1924] In another specific embodiment, polypeptides, antibodies, polynucleotides and/or agonists or antagonists of the present invention are used as a inhibitor of B and/or T cell migration in endothelial cells. This activity disrupts tissue architecture or cognate responses and is useful, for example in disrupting immune responses, and blocking sepsis.

[1925] In another specific embodiment, polypeptides, antibodies, polynucleotides and/or agonists or antagonists of the present invention are used as a therapy for chronic hypergammaglobulinemia evident in such diseases as monoclonal gammopathy of undetermined significance (MGUS), Waldenstrom's disease, related idiopathic monoclonal gammopathies, and plasmacytomas.

[1926] In another specific embodiment, polypeptides, antibodies, polynucleotides and/or agonists or antagonists of the present invention may be employed for instance to inhibit polypeptide chemotaxis and activation of macrophages and their precursors, and of neutrophils, basophils, B lymphocytes and some T-cell subsets, e.g., activated and CD8 cytotoxic T cells and natural killer cells, in certain autoimmune and chronic inflammatory and infective diseases. Examples of autoimmune diseases are described herein and include multiple sclerosis, and insulin-dependent diabetes.

[1927] The polypeptides, antibodies, polynucleotides and/or agonists or antagonists of the present invention may also be employed to treat idiopathic hyper-eosinophilic syndrome by, for example, preventing eosinophil production and migration.

[1928] In another specific embodiment, polypeptides, antibodies, polynucleotides and/or agonists or antagonists of the present invention are used to enhance or inhibit complement mediated cell lysis.

[1929] In another specific embodiment, polypeptides, antibodies, polynucleotides and/or agonists or antagonists of the present invention are used to enhance or inhibit antibody dependent cellular cytotoxicity.

[1930] In another specific embodiment, polypeptides, antibodies, polynucleotides and/or agonists or antagonists of the present invention may also be employed for treating atherosclerosis, for example, by preventing monocyte infiltration in the artery wall.

[1931] In another specific embodiment, polypeptides, antibodies, polynucleotides and/or agonists or antagonists of the present invention may be employed to treat adult respiratory distress syndrome (ARDS).

[1932] In another specific embodiment, polypeptides, antibodies, polynucleotides and/or agonists or antagonists of the present invention may be useful for stimulating wound and tissue repair, stimulating angiogenesis, and/or stimulating the repair of vascular or lymphatic diseases or disorders. Additionally, agonists and antagonists of the invention may be used to stimulate the regeneration of mucosal surfaces.

[1933] In a specific embodiment, polynucleotides or polypeptides, and/or agonists thereof are used to diagnose, prognose, treat, and/or prevent a disorder characterized by primary or acquired immunodeficiency, deficient serum immunoglobulin production, recurrent infections, and/or immune system dysfunction. Moreover, polynucleotides or polypeptides, and/or agonists thereof may be used to treat or prevent infections of the joints, bones, skin, and/or parotid glands, blood-borne infections (e.g., sepsis, meningitis, septic arthritis, and/or osteomyelitis), autoimmune diseases (e.g., those disclosed herein), inflammatory disorders, and malignancies, and/or any disease or disorder or condition associated with these infections, diseases, disorders and/or malignancies) including, but not limited to, CVID, other primary immune deficiencies, HIV disease, CLL, recurrent bronchitis, sinusitis, otitis media, conjunctivitis, pneumonia, hepatitis, meningitis, herpes zoster (e.g., severe herpes zoster), and/or pneumocystis carnii. Other diseases and disorders that may be prevented, diagnosed, prognosed, and/or treated with polynucleotides or polypeptides, and/or agonists of the present invention include, but are not limited to, HIV infection, HTLV-BLV infection, lymphopenia, phagocyte bactericidal dysfunction anemia, thrombocytopenia, and hemoglobinuria.

[1934] In another embodiment, polynucleotides, polypeptides, antibodies, and/or agonists or antagonists of the present invention are used to treat, and/or diagnose an individual having common variable immunodeficiency disease (“CVID”; also known as “acquired agammaglobulinemia” and “acquired hypogammaglobulinemia”) or a subset of this disease.

[1935] In a specific embodiment, polynucleotides, polypeptides, antibodies, and/or agonists or antagonists of the present invention may be used to diagnose, prognose, prevent, and/or treat cancers or neoplasms including immune cell or immune tissue-related cancers or neoplasms. Examples of cancers or neoplasms that may be prevented, diagnosed, or treated by polynucleotides, polypeptides, antibodies, and/or agonists or antagonists of the present invention include, but are not limited to, acute myelogenous leukemia, chronic myelogenous leukemia, Hodgkin's disease, non-Hodgkin's lymphoma, acute lymphocytic anemia (ALL) Chronic lymphocyte leukemia, plasmacytomas, multiple myeloma, Burkitt's lymphoma, EBV-transformed diseases, and/or diseases and disorders described in the section entitled “Hyperproliferative Disorders” elsewhere herein.

[1936] In another specific embodiment, polypeptides, antibodies, polynucleotides and/or agonists or antagonists of the present invention are used as a therapy for decreasing cellular proliferation of Large B-cell Lymphomas.

[1937] In another specific embodiment, polypeptides, antibodies, polynucleotides and/or agonists or antagonists of the present invention are used as a means of decreasing the involvement of B cells and Ig associated with Chronic Myelogenous Leukemia.

[1938] In specific embodiments, the compositions of the invention are used as an agent to boost immunoresponsiveness among B cell immunodeficient individuals, such as, for example, an individual who has undergone a partial or complete splenectomy.

[1939] Antagonists of the invention include, for example, binding and/or inhibitory antibodies, antisense nucleic acids, ribozymes or soluble forms of the polypeptides of the present invention (e.g., Fc fusion protein; see, e.g., Example 9). Agonists of the invention include, for example, binding or stimulatory antibodies, and soluble forms of the polypeptides (e.g., Fc fusion proteins; see, e.g., Example 9). polypeptides, antibodies, polynucleotides and/or agonists or antagonists of the present invention may be employed in a composition with a pharmaceutically acceptable carrier, e.g., as described herein.

[1940] In another embodiment, polypeptides, antibodies, polynucleotides and/or agonists or antagonists of the present invention are administered to an animal (including, but not limited to, those listed above, and also including transgenic animals) incapable of producing functional endogenous antibody molecules or having an otherwise compromised endogenous immune system, but which is capable of producing human immunoglobulin molecules by means of a reconstituted or partially reconstituted immune system from another animal (see, e.g., published PCT Application Nos. WO98/24893, WO/9634096, WO/9633735, and WO/9110741). Administration of polypeptides, antibodies, polynucleotides and/or agonists or antagonists of the present invention to such animals is useful for the generation of monoclonal antibodies against the polypeptides, antibodies, polynucleotides and/or agonists or antagonists of the present invention in an organ system listed above.

[1941] Blood-Related Disorders

[1942] The polynucleotides, polypeptides, antibodies, and/or agonists or antagonists of the present invention may be used to modulate hemostatic (the stopping of bleeding) or thrombolytic (clot dissolving) activity. For example, by increasing hemostatic or thrombolytic activity, polynucleotides or polypeptides, and/or agonists or antagonists of the present invention could be used to treat or prevent blood coagulation diseases, disorders, and/or conditions (e.g., afibrinogenemia, factor deficiencies, hemophilia), blood platelet diseases, disorders, and/or conditions (e.g., thrombocytopenia), or wounds resulting from trauma, surgery, or other causes. Alternatively, polynucleotides, polypeptides, antibodies, and/or agonists or antagonists of the present invention that can decrease hemostatic or thrombolytic activity could be used to inhibit or dissolve clotting. These molecules could be important in the treatment or prevention of heart attacks (infarction), strokes, or scarring.

[1943] In specific embodiments, the polynucleotides, polypeptides, antibodies, and/or agonists or antagonists of the present invention may be used to prevent, diagnose, prognose, and/or treat thrombosis, arterial thrombosis, venous thrombosis, thromboembolism, pulmonary embolism, atherosclerosis, myocardial infarction, transient ischemic attack, unstable angina. In specific embodiments, the polynucleotides, polypeptides, antibodies, and/or agonists or antagonists of the present invention may be used for the prevention of occulsion of saphenous grafts, for reducing the risk of periprocedural thrombosis as might accompany angioplasty procedures, for reducing the risk of stroke in patients with atrial fibrillation including nonrheumatic atrial fibrillation, for reducing the risk of embolism associated with mechanical heart valves and or mitral valves disease. Other uses for the polynucleotides, polypeptides, antibodies, and/or agonists or antagonists of the present invention, include, but are not limited to, the prevention of occlusions in extrcorporeal devices (e.g., intravascular canulas, vascular access shunts in hemodialysis patients, hemodialysis machines, and cardiopulmonary bypass machines).

[1944] In another embodiment, a polypeptide of the invention, or polynucleotides, antibodies, agonists, or antagonists corresponding to that polypeptide, may be used to prevent, diagnose, prognose, and/or treat diseases and disorders of the blood and/or blood forming organs associated with the tissue(s) in which the polypeptide of the invention is expressed, including one, two, three, four, five, or more tissues disclosed in the “FEATURES OF PROTEIN” section for each gene.

[1945] The polynucleotides, polypeptides, antibodies, and/or agonists or antagonists of the present invention may be used to modulate hematopoietic activity (the formation of blood cells). For example, the polynucleotides, polypeptides, antibodies, and/or agonists or antagonists of the present invention may be used to increase the quantity of all or subsets of blood cells, such as, for example, erythrocytes, lymphocytes (B or T cells), myeloid cells (e.g., basophils, eosinophils, neutrophils, mast cells, macrophages) and platelets. The ability to decrease the quantity of blood cells or subsets of blood cells may be useful in the prevention, detection, diagnosis and/or treatment of anemias and leukopenias described below. Alternatively, the polynucleotides, polypeptides, antibodies, and/or agonists or antagonists of the present invention may be used to decrease the quantity of all or subsets of blood cells, such as, for example, erythrocytes, lymphocytes (B or T cells), myeloid cells (e.g., basophils, eosinophils, neutrophils, mast cells, macrophages) and platelets. The ability to decrease the quantity of blood cells or subsets of blood cells may be useful in the prevention, detection, diagnosis and/or treatment of leukocytoses, such as, for example eosinophilia.

[1946] The polynucleotides, polypeptides, antibodies, and/or agonists or antagonists of the present invention may be used to prevent, treat, or diagnose blood dyscrasia.

[1947] Anemias are conditions in which the number of red blood cells or amount of hemoglobin (the protein that carries oxygen) in them is below normal. Anemia may be caused by excessive bleeding, decreased red blood cell production, or increased red blood cell destruction (hemolysis). The polynucleotides, polypeptides, antibodies, and/or agonists or antagonists of the present invention may be useful in treating, preventing, and/or diagnosing anemias. Anemias that may be treated prevented or diagnosed by the polynucleotides, polypeptides, antibodies, and/or agonists or antagonists of the present invention include iron deficiency anemia, hypochromic anemia, microcytic anemia, chlorosis, hereditary siderob;astic anemia, idiopathic acquired sideroblastic anemia, red cell aplasia, megaloblastic anemia (e.g., pernicious anemia, (vitamin B 12 deficiency) and folic acid deficiency anemia), aplastic anemia, bemolytic anemias (e.g., autoimmune helolytic anemia, microangiopathic hemolytic anemia, and paroxysmal nocturnal hemoglobinuria). The polynucleotides, polypeptides, antibodies, and/or agonists or antagonists of the present invention may be useful in treating, preventing, and/or diagnosing anemias associated with diseases including but not limited to, anemias associated with systemic lupus erythematosus, cancers, lymphomas, chronic renal disease, and enlarged spleens. The polynucleotides, polypeptides, antibodies, and/or agonists or antagonists of the present invention may be useful in treating, preventing, and/or diagnosing anemias arising from drug treatments such as anemias associated with methyldopa, dapsone, and/or sulfadrugs. Additionally, rhe polynucleotides, polypeptides, antibodies, and/or agonists or antagonists of the present invention may be useful in treating, preventing, and/or diagnosing anemias associated with abnormal red blood cell architecture including but not limited to, hereditary spherocytosis, hereditary elliptocytosis, glucose-6-phosphate dehydrogenase deficiency, and sickle cell anemia.

[1948] The polynucleotides, polypeptides, antibodies, and/or agonists or antagonists of the present invention may be useful in treating, preventing, and/or diagnosing hemoglobin abnormalities, (e.g., those associated with sickle cell anemia, hemoglobin C disease, hemoglobin S-C disease, and hemoglobin E disease). Additionally, the polynucleotides, polypeptides, antibodies, and/or agonists or antagonists of the present invention may be useful in diagnosing, prognosing, preventing, and/or treating thalassemias, including, but not limited to major and minor forms of alpha-thalassemia and beta-thalassemia.

[1949] In another embodiment, the polynucleotides, polypeptides, antibodies, and/or agonists or antagonists of the present invention may be useful in diagnosing, prognosing, preventing, and/or treating bleeding disorders including, but not limited to, thrombocytopenia (e.g., idiopathic thrombocytopenic purpura, and thrombotic thrombocytopenic purpura), Von Willebrand's disease, hereditary platelet disorders (e.g., storage pool disease such as Chediak-Higashi and Hermansky-Pudlak syndromes, thromboxane A2 dysfunction, thromboasthenia, and Bernard-Soulier syndrome), hemolytic-uremic syndrome, hemophelias such as hemophelia A or Factor VII deficiency and Christmas disease or Factor IX deficiency, Hereditary Hemorhhagic Telangiectsia, also known as Rendu-Osler-Weber syndrome, allergic purpura (Henoch Schonlein purpura) and disseminated intravascular coagulation.

[1950] The effect of the polynucleotides, polypeptides, antibodies, and/or agonists or antagonists of the present invention on the clotting time of blood may be monitored using any of the clotting tests known in the art including, but not limited to, whole blood partial thromboplastin time (PTT), the activated partial thromboplastin time (aPTT), the activated clotting time (ACT), the recalcified activated clotting time, or the Lee-White Clotting time.

[1951] Several diseases and a variety of drugs can cause platelet dysfunction. Thus, in a specific embodiment, the polynucleotides, polypeptides, antibodies, and/or agonists or antagonists of the present invention may be useful in diagnosing, prognosing, preventing, and/or treating acquired platelet dysfunction such as platelet dysfunction accompanying kidney failure, leukemia, multiple myeloma, cirrhosis of the liver, and systemic lupus erythematosus as well as platelet dysfunction associated with drug treatments, including treatment with aspirin, ticlopidine, nonsteroidal anti-inflammatory drugs (used for arthritis, pain, and sprains), and penicillin in high doses.

[1952] In another embodiment, the polynucleotides, polypeptides, antibodies, and/or agonists or antagonists of the present invention may be useful in diagnosing, prognosing, preventing, and/or treating diseases and disorders characterized by or associated with increased or decreased numbers of white blood cells. Leukopenia occurs when the number of white blood cells decreases below normal. Leukopenias include, but are not limited to, neutropenia and lymphocytopenia. An increase in the number of white blood cells compared to normal is known as leukocytosis. The body generates increased numbers of white blood cells during infection. Thus, leukocytosis may simply be a normal physiological parameter that reflects infection. Alternatively, leukocytosis may be an indicator of injury or other disease such as cancer. Leokocytoses, include but are not limited to, eosinophilia, and accumulations of macrophages. In specific embodiments, the polynucleotides, polypeptides, antibodies, and/or agonists or antagonists of the present invention may be useful in diagnosing, prognosing, preventing, and/or treating leukopenia. In other specific embodiments, the polynucleotides, polypeptides, antibodies, and/or agonists or antagonists of the present invention may be useful in diagnosing, prognosing, preventing, and/or treating leukocytosis.

[1953] Leukopenia may be a generalized decreased in all types of white blood cells, or may be a specific depletion of particular types of white blood cells. Thus, in specific embodiments, the polynucleotides, polypeptides, antibodies, and/or agonists or antagonists of the present invention may be useful in diagnosing, prognosing, preventing, and/or treating decreases in neutrophil numbers, known as neutropenia. Neutropenias that may be diagnosed, prognosed, prevented, and/or treated by the polynucleotides, polypeptides, antibodies, and/or agonists or antagonists of the present invention include, but are not limited to, infantile genetic agranulocytosis, familial neutropenia, cyclic neutropenia, neutropenias resulting from or associated with dietary deficiencies (e.g., vitamin B 12 deficiency or folic acid deficiency), neutropenias resulting from or associated with drug treatments (e.g., antibiotic regimens such as penicillin treatment, sulfonamide treatment, anticoagulant treatment, anticonvulsant drugs, anti-thyroid drugs, and cancer chemotherapy), and neutropenias resulting from increased neutrophil destruction that may occur in association with some bacterial or viral infections, allergic disorders, autoimmune diseases, conditions in which an individual has an enlarged spleen (e.g., Felty syndrome, malaria and sarcoidosis), and some drug treatment regimens.

[1954] The polynucleotides, polypeptides, antibodies, and/or agonists or antagonists of the present invention may be useful in diagnosing, prognosing, preventing, and/or treating lymphocytopenias (decreased numbers of B and/or T lymphocytes), including, but not limited lymphocytopenias resulting from or associated with stress, drug treatments (e.g., drug treatment with corticosteroids, cancer chemotherapies, and/or radiation therapies), AIDS infection and/or other diseases such as, for example, cancer, rheumatoid arthritis, systemic lupus erythematosus, chronic infections, some viral infections and/or hereditary disorders (e.g., DiGeorge syndrome, Wiskott-Aldrich Syndome, severe combined immunodeficiency, ataxia telangiectsia).

[1955] The polynucleotides, polypeptides, antibodies, and/or agonists or antagonists of the present invention may be useful in diagnosing, prognosing, preventing, and/or treating diseases and disorders associated with macrophage numbers and/or macrophage function including, but not limited to, Gaucher's disease, Niemann-Pick disease, Letterer-Siwe disease and Hand-Schuller-Christian disease.

[1956] In another embodiment, the polynucleotides, polypeptides, antibodies, and/or agonists or antagonists of the present invention may be useful in diagnosing, prognosing, preventing, and/or treating diseases and disorders associated with eosinophil numbers and/or eosinophil function including, but not limited to, idiopathic hypereosinophilic syndrome, eosinophilia-myalgia syndrome, and Hand-Schuller-Christian disease.

[1957] In yet another embodiment, the polynucleotides, polypeptides, antibodies, and/or agonists or antagonists of the present invention may be useful in diagnosing, prognosing, preventing, and/or treating leukemias and lymphomas including, but not limited to, acute lymphocytic (lymphpblastic) leukemia (ALL), acute myeloid (myelocytic, myelogenous, myeloblastic, or myelomonocytic) leukemia, chronic lymphocytic leukemia (e.g., B cell leukemias, T cell leukemias, Sezary syndrome, and Hairy cell leukenia), chronic myelocytic (myeloid, myelogenous, or granulocytic) leukemia, Hodgkin's lymphoma, non-hodgkin's lymphoma, Burkitt's lymphoma, and mycosis fungoides.

[1958] In other embodiments, the polynucleotides, polypeptides, antibodies, and/or agonists or antagonists of the present invention may be useful in diagnosing, prognosing, preventing, and/or treating diseases and disorders of plasma cells including, but not limited to, plasma cell dyscrasias, monoclonal gammaopathies, monoclonal gammopathies of undetermined significance, multiple myeloma, macroglobulinemia, Waldenstrom's macroglobulinemia, cryoglobulinemia, and Raynaud's phenomenon.

[1959] In other embodiments, the polynucleotides, polypeptides, antibodies, and/or agonists or antagonists of the present invention may be useful in treating, preventing, and/or diagnosing myeloproliferative disorders, including but not limited to, polycythemia vera, relative polycythemia, secondary polycythemia, myelofibrosis, acute myelofibrosis, agnogenic myelod metaplasia, thrombocythemia, (including both primary and seconday thrombocythemia) and chronic myelocytic leukemia.

[1960] In other embodiments, the polynucleotides, polypeptides, antibodies, and/or agonists or antagonists of the present invention may be useful as a treatment prior to surgery, to increase blood cell production.

[1961] In other embodiments, the polynucleotides, polypeptides, antibodies, and/or agonists or antagonists of the present invention may be useful as an agent to enhance the migration, phagocytosis, superoxide production, antibody dependent cellular cytotoxicity of neutrophils, eosionophils and macrophages.

[1962] In other embodiments, the polynucleotides, polypeptides, antibodies, and/or agonists or antagonists of the present invention may be useful as an agent to increase the number of stem cells in circulation prior to stem cells pheresis. In another specific embodiment, the polynucleotides, polypeptides, antibodies, and/or agonists or antagonists of the present invention may be useful as an agent to increase the number of stem cells in circulation prior to platelet pheresis.

[1963] In other embodiments, the polynucleotides, polypeptides, antibodies, and/or agonists or antagonists of the present invention may be useful as an agent to increase cytokine production.

[1964] In other embodiments, the polynucleotides, polypeptides, antibodies, and/or agonists or antagonists of the present invention may be useful in preventing, diagnosing, and/or treating primary hematopoietic disorders.

[1965] Hyperproliferative Disorders

[1966] In certain embodiments, polynucleotides or polypeptides, or agonists or antagonists of the present invention can be used to treat or detect hyperproliferative disorders, including neoplasms. Polynucleotides or polypeptides, or agonists or antagonists of the present invention may inhibit the proliferation of the disorder through direct or indirect interactions. Alternatively, Polynucleotides or polypeptides, or agonists or antagonists of the present invention may proliferate other cells which can inhibit the hyperproliferative disorder.

[1967] For example, by increasing an immune response, particularly increasing antigenic qualities of the hyperproliferative disorder or by proliferating, differentiating, or mobilizing T-cells, hyperproliferative disorders can be treated. This immune response may be increased by either enhancing an existing immune response, or by initiating a new immune response. Alternatively, decreasing an immune response may also be a method of treating hyperproliferative disorders, such as a chemotherapeutic agent.

[1968] Examples of hyperproliferative disorders that can be treated or detected by polynucleotides or polypeptides, or agonists or antagonists of the present invention include, but are not limited to neoplasms located in the: colon, abdomen, bone, breast, digestive system, liver, pancreas, peritoneum, endocrine glands (adrenal, parathyroid, pituitary, testicles, ovary, thymus, thyroid), eye, head and neck, nervous (central and peripheral), lymphatic system, pelvis, skin, soft tissue, spleen, thorax, and urogenital tract.

[1969] Similarly, other hyperproliferative disorders can also be treated or detected by polynucleotides or polypeptides, or agonists or antagonists of the present invention.

[1970] Examples of such hyperproliferative disorders include, but are not limited to: Acute Childhood Lymphoblastic Leukemia, Acute Lymphoblastic Leukemia, Acute Lymphocytic Leukemia, Acute Myeloid Leukemia, Adrenocortical Carcinoma, Adult (Primary) Hepatocellular Cancer, Adult (Primary) Liver Cancer, Adult Acute Lymphocytic Leukemia, Adult Acute Myeloid Leukemia, Adult Hodgkin's Disease, Adult Hodgkin's Lymphoma, Adult Lymphocytic Leukemia, Adult Non-Hodgkin's Lymphoma, Adult Primary Liver Cancer, Adult Soft Tissue Sarcoma, AIDS-Related Lymphoma, AIDS-Related Malignancies, Anal Cancer, Astrocytoma, Bile Duct Cancer, Bladder Cancer, Bone Cancer, Brain Stem Glioma, Brain Tumors, Breast Cancer, Cancer of the Renal Pelvis and Ureter, Central Nervous System (Primary) Lymphoma, Central Nervous System Lymphoma, Cerebellar Astrocytoma, Cerebral Astrocytoma, Cervical Cancer, Childhood (Primary) Hepatocellular Cancer, Childhood (Primary) Liver Cancer, Childhood Acute Lymphoblastic Leukemia, Childhood Acute Myeloid Leukemia, Childhood Brain Stem Glioma, Childhood Cerebellar Astrocytoma, Childhood Cerebral Astrocytoma, Childhood Extracranial Germ Cell Tumors, Childhood Hodgkin's Disease, Childhood Hodgkin's Lymphoma, Childhood Hypothalamic and Visual Pathway Glioma, Childhood Lymphoblastic Leukemia, Childhood Medulloblastoma, Childhood Non-Hodgkin's Lymphoma, Childhood Pineal and Supratentorial Primitive Neuroectodermal Tumors, Childhood Primary Liver Cancer, Childhood Rhabdomyosarcoma, Childhood Soft Tissue Sarcoma, Childhood Visual Pathway and Hypothalamic Glioma, Chronic Lymphocytic Leukemia, Chronic Myelogenous Leukemia, Colon Cancer, Cutaneous T-Cell Lymphoma, Endocrine Pancreas Islet Cell Carcinoma, Endometrial Cancer, Ependymoma, Epithelial Cancer, Esophageal Cancer, Ewing's Sarcoma and Related Tumors, Exocrine Pancreatic Cancer, Extracranial Germ Cell Tumor, Extragonadal Germ Cell Tumor, Extrahepatic Bile Duct Cancer, Eye Cancer, Female Breast Cancer, Gaucher's Disease, Gallbladder Cancer, Gastric Cancer, Gastrointestinal Carcinoid Tumor, Gastrointestinal Tumors, Germ Cell Tumors, Gestational Trophoblastic Tumor, Hairy Cell Leukemia, Head and Neck Cancer, Hepatocellular Cancer, Hodgkin's Disease, Hodgkin's Lymphoma, Hypergammaglobulinemia, Hypopharyngeal Cancer, Intestinal Cancers, Intraocular Melanoma, Islet Cell Carcinoma, Islet Cell Pancreatic Cancer, Kaposi's Sarcoma, Kidney Cancer, Laryngeal Cancer, Lip and Oral Cavity Cancer, Liver Cancer, Lung Cancer, Lymphoproliferative Disorders, Macroglobulinemia, Male Breast Cancer, Malignant Mesothelioma, Malignant Thymoma, Medulloblastoma, Melanoma, Mesothelioma, Metastatic Occult Primary Squamous Neck Cancer, Metastatic Primary Squamous Neck Cancer, Metastatic Squamous Neck Cancer, Multiple Myeloma, Multiple Myeloma/Plasma Cell Neoplasm, Myelodysplastic Syndrome, Myelogenous Leukemia, Myeloid Leukemia, Myeloproliferative Disorders, Nasal Cavity and Paranasal Sinus Cancer, Nasopharyngeal Cancer, Neuroblastoma, Non-Hodgkin's Lymphoma During Pregnancy, Nonmelanoma Skin Cancer, Non-Small Cell Lung Cancer, Occult Primary Metastatic Squamous Neck Cancer, Oropharyngeal Cancer, Osteo-/Malignant Fibrous Sarcoma, Osteosarcoma/Malignant Fibrous Histiocytoma, Osteosarcoma/Malignant Fibrous Histiocytoma of Bone, Ovarian Epithelial Cancer, Ovarian Germ Cell Tumor, Ovarian Low Malignant Potential Tumor, Pancreatic Cancer, Paraproteinemias, Purpura, Parathyroid Cancer, Penile Cancer, Pheochromocytoma, Pituitary Tumor, Plasma Cell Neoplasm/Multiple Myeloma, Primary Central Nervous System Lymphoma, Primary Liver Cancer, Prostate Cancer, Rectal Cancer, Renal Cell Cancer, Renal Pelvis and Ureter Cancer, Retinoblastoma, Rhabdomyosarcoma, Salivary Gland Cancer, Sarcoidosis Sarcomas, Sezary Syndrome, Skin Cancer, Small Cell Lung Cancer, Small Intestine Cancer, Soft Tissue Sarcoma, Squamous Neck Cancer, Stomach Cancer, Supratentorial Primitive Neuroectodermal and Pineal Tumors, T-Cell Lymphoma, Testicular Cancer, Thymoma, Thyroid Cancer, Transitional Cell Cancer of the Renal Pelvis and Ureter, Transitional Renal Pelvis and Ureter Cancer, Trophoblastic Tumors, Ureter and Renal Pelvis Cell Cancer, Urethral Cancer, Uterine Cancer, Uterine Sarcoma, Vaginal Cancer, Visual Pathway and Hypothalamic Glioma, Vulvar Cancer, Waldenstrom's Macroglobulinemia, Wilms' Tumor, and any other hyperproliferative disease, besides neoplasia, located in an organ system listed above.

[1971] In another preferred embodiment, polynucleotides or polypeptides, or agonists or antagonists of the present invention are used to diagnose, prognose, prevent, and/or treat premalignant conditions and to prevent progression to a neoplastic or malignant state, including but not limited to those disorders described above. Such uses are indicated in conditions known or suspected of preceding progression to neoplasia or cancer, in particular, where non-neoplastic cell growth consisting of hyperplasia, metaplasia, or most particularly, dysplasia has occurred (for review of such abnormal growth conditions, see Robbins and Angell, 1976, Basic Pathology, 2d Ed., W. B. Saunders Co., Philadelphia, pp. 68-79.) Hyperplasia is a form of controlled cell proliferation, involving an increase in cell number in a tissue or organ, without significant alteration in structure or function.

[1972] Hyperplastic disorders which can be diagnosed, prognosed, prevented, and/or treated with compositions of the invention (including polynucleotides, polypeptides, agonists or antagonists) include, but are not limited to, angiofollicular mediastinal lymph node hyperplasia, angiolymphoid hyperplasia with eosinophilia, a typical melanocytic hyperplasia, basal cell hyperplasia, benign giant lymph node hyperplasia, cementum hyperplasia, congenital adrenal hyperplasia, congenital sebaceous hyperplasia, cystic hyperplasia, cystic hyperplasia of the breast, denture hyperplasia, ductal hyperplasia, endometrial hyperplasia, fibromuscular hyperplasia, focal epithelial hyperplasia, gingival hyperplasia, inflammatory fibrous hyperplasia, inflammatory papillary hyperplasia, intravascular papillary endothelial hyperplasia, nodular hyperplasia of prostate, nodular regenerative hyperplasia, pseudoepitheliomatous hyperplasia, senile sebaceous hyperplasia, and verrucous hyperplasia.

[1973] Metaplasia is a form of controlled cell growth in which one type of adult or fully differentiated cell substitutes for another type of adult cell. Metaplastic disorders which can be diagnosed, prognosed, prevented, and/or treated with compositions of the invention (including polynucleotides, polypeptides, agonists or antagonists) include, but are not limited to, agnogenic myeloid metaplasia, apocrine metaplasia, a typical metaplasia, autoparenchymatous metaplasia, connective tissue metaplasia, epithelial metaplasia, intestinal metaplasia, metaplastic anemia, metaplastic ossification, metaplastic polyps, myeloid metaplasia, primary myeloid metaplasia, secondary myeloid metaplasia, squamous metaplasia, squamous metaplasia of amnion, and symptomatic myeloid metaplasia.

[1974] Dysplasia is frequently a forerunner of cancer, and is found mainly in the epithelia; it is the most disorderly form of non-neoplastic cell growth, involving a loss in individual cell uniformity and in the architectural orientation of cells. Dysplastic cells often have abnormally large, deeply stained nuclei, and exhibit pleomorphism. Dysplasia characteristically occurs where there exists chronic irritation or inflammation. Dysplastic disorders which can be diagnosed, prognosed, prevented, and/or treated with compositions of the invention (including polynucleotides, polypeptides, agonists or antagonists) include, but are not limited to, anhidrotic ectodermal dysplasia, anterofacial dysplasia, asphyxiating thoracic dysplasia, atriodigital dysplasia, bronchopulmonary dysplasia, cerebral dysplasia, cervical dysplasia, chondroectodermal dysplasia, cleidocranial dysplasia, congenital ectodermal dysplasia, craniodiaphysial dysplasia, craniocarpotarsal dysplasia, craniometaphysial dysplasia, dentin dysplasia, diaphysial dysplasia, ectodermal dysplasia, enamel dysplasia, encephalo-ophthalmic dysplasia, dysplasia epiphysialis hemimelia, dysplasia epiphysialis multiplex, dysplasia epiphysialis punctata, epithelial dysplasia, faciodigitogenital dysplasia, familial fibrous dysplasia ofjaws, familial white folded dysplasia, fibromuscular dysplasia, fibrous dysplasia of bone, florid osseous dysplasia, hereditary renal-retinal dysplasia, hidrotic ectodermal dysplasia, hypohidrotic ectodermal dysplasia, lymphopenic thymic dysplasia, mammary dysplasia, mandibulofacial dysplasia, metaphysial dysplasia, Mondini dysplasia, monostotic fibrous dysplasia, mucoepithelial dysplasia, multiple epiphysial dysplasia, oculoauriculovertebral dysplasia, oculodentodigital dysplasia, oculovertebral dysplasia, odontogenic dysplasia, ophthalmomandibulomelic dysplasia, periapical cemental dysplasia, polyostotic fibrous dysplasia, pseudoachondroplastic spondyloepiphysial dysplasia, retinal dysplasia, septo-optic dysplasia, spondyloepiphysial dysplasia, and ventriculoradial dysplasia.

[1975] Additional pre-neoplastic disorders which can be diagnosed, prognosed, prevented, and/or treated with compositions of the invention (including polynucleotides, polypeptides, agonists or antagonists) include, but are not limited to, benign dysproliferative disorders (e.g., benign tumors, fibrocystic conditions, tissue hypertrophy, intestinal polyps, colon polyps, and esophageal dysplasia), leukoplakia, keratoses, Bowen's disease, Farmer's Skin, solar cheilitis, and solar keratosis.

[1976] In another embodiment, a polypeptide of the invention, or polynucleotides, antibodies, agonists, or antagonists corresponding to that polypeptide, may be used to diagnose and/or prognose disorders associated with the tissue(s) in which the polypeptide of the invention is expressed, including one, two, three, four, five, or more tissues disclosed in the “FEATURES OF PROTEIN” section for each gene.

[1977] In another embodiment, polynucleotides, polypeptides, antibodies, and/or agonists or antagonists of the present invention conjugated to a toxin or a radioactive isotope, as described herein, may be used to treat cancers and neoplasms, including, but not limited to those described herein. In a further preferred embodiment, polynucleotides, polypeptides, antibodies, and/or agonists or antagonists of the present invention conjugated to a toxin or a radioactive isotope, as described herein, may be used to treat acute myelogenous leukemia.

[1978] Additionally, polynucleotides, polypeptides, and/or agonists or antagonists of the invention may affect apoptosis, and therefore, would be useful in treating a number of diseases associated with increased cell survival or the inhibition of apoptosis. For example, diseases associated with increased cell survival or the inhibition of apoptosis that could be diagnosed, prognosed, prevented, and/or treated by polynucleotides, polypeptides, and/or agonists or antagonists of the invention, include cancers (such as follicular lymphomas, carcinomas with p53 mutations, and hormone-dependent tumors, including, but not limited to colon cancer, cardiac tumors, pancreatic cancer, melanoma, retinoblastoma, glioblastoma, lung cancer, intestinal cancer, testicular cancer, stomach cancer, neuroblastoma, myxoma, myoma, lymphoma, endothelioma, osteoblastoma, osteoclastoma, osteosarcoma, chondrosarcoma, adenoma, breast cancer, prostate cancer, Kaposi's sarcoma and ovarian cancer); autoimmune disorders such as, multiple sclerosis, Sjogren's syndrome, Hashimoto's thyroiditis, biliary cirrhosis, Behcet's disease, Crohn's disease, polymyositis, systemic lupus erythematosus and immune-related glomerulonephritis and rheumatoid arthritis) and viral infections (such as herpes viruses, pox viruses and adenoviruses), inflammation, graft v. host disease, acute graft rejection, and chronic graft rejection.

[1979] In preferred embodiments, polynucleotides, polypeptides, and/or agonists or antagonists of the invention are used to inhibit growth, progression, and/or metastasis of cancers, in particular those listed above.

[1980] Additional diseases or conditions associated with increased cell survival that could be diagnosed, prognosed, prevented, and/or treated by polynucleotides, polypeptides, and/or agonists or antagonists of the invention, include, but are not limited to, progression, and/or metastases of malignancies and related disorders such as leukemia (including acute leukemias (e.g., acute lymphocytic leukemia, acute myelocytic leukemia (including myeloblastic, promyelocytic, myelomonocytic, monocytic, and erythroleukemia)) and chronic leukemias (e.g., chronic myelocytic (granulocytic) leukemia and chronic lymphocytic leukemia)), polycythemia vera, lymphomas (e.g., Hodgkin's disease and non-Hodgkin's disease), multiple myeloma, Waldenstrom's macroglobulinemia, heavy chain disease, and solid tumors including, but not limited to, sarcomas and carcinomas such as fibrosarcoma, myxosarcoma, liposarcoma, chondrosarcoma, osteogenic sarcoma, chordoma, angiosarcoma, endotheliosarcoma, lymphangiosarcoma, lymphangioendotheliosarcoma, synovioma, mesothelioma, Ewing's tumor, leiomyosarcoma, rhabdomyosarcoma, colon carcinoma, pancreatic cancer, breast cancer, ovarian cancer, prostate cancer, squamous cell carcinoma, basal cell carcinoma, adenocarcinoma, sweat gland carcinoma, sebaceous gland carcinoma, papillary carcinoma, papillary adenocarcinomas, cystadenocarcinoma, medullary carcinoma, bronchogenic carcinoma, renal cell carcinoma, hepatoma, bile duct carcinoma, choriocarcinoma, seminoma, embryonal carcinoma, Wilm's tumor, cervical cancer, testicular tumor, lung carcinoma, small cell lung carcinoma, bladder carcinoma, epithelial carcinoma, glioma, astrocytoma, medulloblastoma, craniopharyngioma, ependymoma, pinealoma, emangioblastoma, acoustic neuroma, oligodendroglioma, menangioma, melanoma, neuroblastoma, and retinoblastoma.

[1981] Diseases associated with increased apoptosis that could be diagnosed, prognosed, prevented, and/or treated by polynucleotides, polypeptides, and/or agonists or antagonists of the invention, include AIDS; neurodegenerative disorders (such as Alzheimer's disease, Parkinson's disease, amyotrophic lateral sclerosis, retinitis pigmentosa, cerebellar degeneration and brain tumor or prior associated disease); autoimmune disorders (such as, multiple sclerosis, Sjogren's syndrome, Hashimoto's thyroiditis, biliary cirrhosis, Behcet's disease, Crohn's disease, polymyositis, systemic lupus erythematosus and immune-related glomerulonephritis and rheumatoid arthritis) myelodysplastic syndromes (such as aplastic anemia), graft v. host disease, ischemic injury (such as that caused by myocardial infarction, stroke and reperfusion injury), liver injury (e.g., hepatitis related liver injury, ischemialreperfusion injury, cholestosis (bile duct injury) and liver cancer); toxin-induced liver disease (such as that caused by alcohol), septic shock, cachexia and anorexia.

[1982] Hyperproliferative diseases and/or disorders that could be diagnosed, prognosed, prevented, and/or treated by polynucleotides, polypeptides, and/or agonists or antagonists of the invention, include, but are not limited to, neoplasms located in the liver, abdomen, bone, breast, digestive system, pancreas, peritoneum, endocrine glands (adrenal, parathyroid, pituitary, testicles, ovary, thymus, thyroid), eye, head and neck, nervous system (central and peripheral), lymphatic system, pelvis, skin, soft tissue, spleen, thorax, and urogenital tract.

[1983] Similarly, other hyperproliferative disorders can also be diagnosed, prognosed, prevented, and/or treated by polynucleotides, polypeptides, and/or agonists or antagonists of the invention. Examples of such hyperproliferative disorders include, but are not limited to: hypergammaglobulinemia, lymphoproliferative disorders, paraproteinemias, purpura, sarcoidosis, Sezary Syndrome, Waldenstron's macroglobulinemia, Gaucher's Disease, histiocytosis, and any other hyperproliferative disease, besides neoplasia, located in an organ system listed above.

[1984] Another preferred embodiment utilizes polynucleotides of the present invention to inhibit aberrant cellular division, by gene therapy using the present invention, and/or protein fusions or fragments thereof.

[1985] Thus, the present invention provides a method for treating cell proliferative disorders by inserting into an abnormally proliferating cell a polynucleotide of the present invention, wherein said polynucleotide represses said expression.

[1986] Another embodiment of the present invention provides a method of treating cell-proliferative disorders in individuals comprising administration of one or more active gene copies of the present invention to an abnormally proliferating cell or cells. In a preferred embodiment, polynucleotides of the present invention is a DNA construct comprising a recombinant expression vector effective in expressing a DNA sequence encoding said polynucleotides. In another preferred embodiment of the present invention, the DNA construct encoding the polynucleotides of the present invention is inserted into cells to be treated utilizing a retrovirus, or more preferably an adenoviral vector (See G J. Nabel, et. al., PNAS 1999 96: 324-326, which is hereby incorporated by reference). In a most preferred embodiment, the viral vector is defective and will not transform non-proliferating cells, only proliferating cells. Moreover, in a preferred embodiment, the polynucleotides of the present invention inserted into proliferating cells either alone, or in combination with or fused to other polynucleotides, can then be modulated via an external stimulus (i.e. magnetic, specific small molecule, chemical, or drug administration, etc.), which acts upon the promoter upstream of said polynucleotides to induce expression of the encoded protein product. As such the beneficial therapeutic affect of the present invention may be expressly modulated (i.e. to increase, decrease, or inhibit expression of the present invention) based upon said external stimulus.

[1987] Polynucleotides of the present invention may be useful in repressing expression of oncogenic genes or antigens. By “repressing expression of the oncogenic genes” is intended the suppression of the transcription of the gene, the degradation of the gene transcript (pre-message RNA), the inhibition of splicing, the destruction of the messenger RNA, the prevention of the post-translational modifications of the protein, the destruction of the protein, or the inhibition of the normal function of the protein.

[1988] For local administration to abnormally proliferating cells, polynucleotides of the present invention may be administered by any method known to those of skill in the art including, but not limited to transfection, electroporation, microinjection of cells, or in vehicles such as liposomes, lipofectin, or as naked polynucleotides, or any other method described throughout the specification. The polynucleotide of the present invention may be delivered by known gene delivery systems such as, but not limited to, retroviral vectors (Gilboa, J. Virology 44:845 (1982); Hocke, Nature 320:275 (1986); Wilson, et al., Proc. Natl. Acad. Sci. U.S.A. 85:3014), vaccinia virus system (Chakrabarty et al., Mol. Cell Biol. 5:3403 (1985) or other efficient DNA delivery systems (Yates et al., Nature 313:812 (1985)) known to those skilled in the art. These references are exemplary only and are hereby incorporated by reference. In order to specifically deliver or transfect cells which are abnormally proliferating and spare non-dividing cells, it is preferable to utilize a retrovirus, or adenoviral (as described in the art and elsewhere herein) delivery system known to those of skill in the art. Since host DNA replication is required for retroviral DNA to integrate and the retrovirus will be unable to self replicate due to the lack of the retrovirus genes needed for its life cycle. Utilizing such a retroviral delivery system for polynucleotides of the present invention will target said gene and constructs to abnormally proliferating cells and will spare the non-dividing normal cells.

[1989] The polynucleotides of the present invention may be delivered directly to cell proliferative disorder/disease sites in internal organs, body cavities and the like by use of imaging devices used to guide an injecting needle directly to the disease site. The polynucleotides of the present invention may also be administered to disease sites at the time of surgical intervention.

[1990] By “cell proliferative disease” is meant any human or animal disease or disorder, affecting any one or any combination of organs, cavities, or body parts, which is characterized by single or multiple local abnormal proliferations of cells, groups of cells, or tissues, whether benign or malignant.

[1991] Any amount of the polynucleotides of the present invention may be administered as long as it has a biologically inhibiting effect on the proliferation of the treated cells. Moreover, it is possible to administer more than one of the polynucleotide of the present invention simultaneously to the same site. By “biologically inhibiting” is meant partial or total growth inhibition as well as decreases in the rate of proliferation or growth of the cells. The biologically inhibitory dose may be determined by assessing the effects of the polynucleotides of the present invention on target malignant or abnormally proliferating cell growth in tissue culture, tumor growth in animals and cell cultures, or any other method known to one of ordinary skill in the art.

[1992] The present invention is further directed to antibody-based therapies which involve administering of anti-polypeptides and anti-polynucleotide antibodies to a mammalian, preferably human, patient for treating one or more of the described disorders. Methods for producing anti-polypeptides and anti-polynucleotide antibodies polyclonal and monoclonal antibodies are described in detail elsewhere herein. Such antibodies may be provided in pharmaceutically acceptable compositions as known in the art or as described herein.

[1993] A summary of the ways in which the antibodies of the present invention may be used therapeutically includes binding polynucleotides or polypeptides of the present invention locally or systemically in the body or by direct cytotoxicity of the antibody, e.g. as mediated by complement (CDC) or by effector cells (ADCC). Some of these approaches are described in more detail below. Armed with the teachings provided herein, one of ordinary skill in the art will know how to use the antibodies of the present invention for diagnostic, monitoring or therapeutic purposes without undue experimentation.

[1994] In particular, the antibodies, fragments and derivatives of the present invention are useful for treating a subject having or developing cell proliferative and/or differentiation disorders as described herein. Such treatment comprises administering a single or multiple doses of the antibody, or a fragment, derivative, or a conjugate thereof.

[1995] The antibodies of this invention may be advantageously utilized in combination with other monoclonal or chimeric antibodies, or with lymphokines or hematopoietic growth factors, for example, which serve to increase the number or activity of effector cells which interact with the antibodies.

[1996] It is preferred to use high affinity and/or potent in vivo inhibiting and/or neutralizing antibodies against polypeptides or polynucleotides of the present invention, fragments or regions thereof, for both immunoassays directed to and therapy of disorders related to polynucleotides or polypeptides, including fragements thereof, of the present invention. Such antibodies, fragments, or regions, will preferably have an affinity for polynucleotides or polypeptides, including fragements thereof. Preferred binding affinities include those with a dissociation constant or Kd less than 5×10⁻⁶M, 10⁻⁶M, 5×10⁻⁷M, 10⁻⁷M, 5×10⁻⁸M, 10⁻⁸M, 5×10⁻⁹M, 10⁻⁹M, 5×10⁻¹⁰M, 10⁻¹⁰M, 5×10⁻¹¹M, 10⁻¹¹M, 5×10⁻¹²M, 10⁻¹²M, 5×10⁻¹³M, 10⁻¹³M, 5×10⁻¹⁴M, 10⁻¹⁴M, 5×10⁻¹⁵M, and 10⁻¹⁵M.

[1997] Moreover, polypeptides of the present invention are useful in inhibiting the angiogenesis of proliferative cells or tissues, either alone, as a protein fusion, or in combination with other polypeptides directly or indirectly, as described elsewhere herein. In a most preferred embodiment, said anti-angiogenesis effect may be achieved indirectly, for example, through the inhibition of hematopoietic, tumor-specific cells, such as tumor-associated macrophages (See Joseph I B, et al. J Natl Cancer Inst, 90(21):1648-53 (1998), which is hereby incorporated by reference). Antibodies directed to polypeptides or polynucleotides of the present invention may also result in inhibition of angiogenesis directly, or indirectly (See Witte L, et al., Cancer Metastasis Rev. 17(2):155-61 (1998), which is hereby incorporated by reference)).

[1998] Polypeptides, including protein fusions, of the present invention, or fragments thereof may be useful in inhibiting proliferative cells or tissues through the induction of apoptosis. Said polypeptides may act either directly, or indirectly to induce apoptosis of proliferative cells and tissues, for example in the activation of a death-domain receptor, such as tumor necrosis factor (TNF) receptor-1, CD95 (Fas/APO-1), TNF-receptor-related apoptosis-mediated protein (TRAMP) and TNF-related apoptosis-inducing ligand (TRAIL) receptor-1 and -2 (See Schulze-Osthoff K, et.al., Eur J Biochem 254(3):439-59 (1998), which is hereby incorporated by reference). Moreover, in another preferred embodiment of the present invention, said polypeptides may induce apoptosis through other mechanisms, such as in the activation of other proteins which will activate apoptosis, or through stimulating the expression of said proteins, either alone or in combination with small molecule drugs or adjuviants, such as apoptonin, galectins, thioredoxins, anti-inflammatory proteins (See for example, Mutat Res 400(1-2):447-55 (1998), Med Hypotheses.50(5):423-33 (1998), Chem Biol Interact. April 24;111-112:23-34 (1998), J Mol Med.76(6):402-12 (1998), Int J Tissue React;20(1):3-15 (1998), which are all hereby incorporated by reference).

[1999] Polypeptides, including protein fusions to, or fragments thereof, of the present invention are useful in inhibiting the metastasis of proliferative cells or tissues. Inhibition may occur as a direct result of administering polypeptides, or antibodies directed to said polypeptides as described elsewere herein, or indirectly, such as activating the expression of proteins known to inhibit metastasis, for example alpha 4 integrins, (See, e.g., Curr Top Microbiol Immunol 1998;231:125-41, which is hereby incorporated by reference). Such thereapeutic affects of the present invention may be achieved either alone, or in combination with small molecule drugs or adjuvants.

[2000] In another embodiment, the invention provides a method of delivering compositions containing the polypeptides of the invention (e.g., compositions containing polypeptides or polypeptide antibodes associated with heterologous polypeptides, heterologous nucleic acids, toxins, or prodrugs) to targeted cells expressing the polypeptide of the present invention. Polypeptides or polypeptide antibodes of the invention may be associated with with heterologous polypeptides, heterologous nucleic acids, toxins, or prodrugs via hydrophobic, hydrophilic, ionic and/or covalent interactions.

[2001] Polypeptides, protein fusions to, or fragments thereof, of the present invention are useful in enhancing the immunogenicity and/or antigenicity of proliferating cells or tissues, either directly, such as would occur if the polypeptides of the present invention ‘vaccinated’ the immune response to respond to proliferative antigens and immunogens, or indirectly, such as in activating the expression of proteins known to enhance the immune response (e.g. chemokines), to said antigens and immunogens.

[2002] Renal Disorders

[2003] Polynucleotides, polypeptides, antibodies, and/or agonists or antagonists of the present invention, may be used to treat, prevent, diagnose, and/or prognose disorders of the renal system. Renal disorders which can be diagnosed, prognosed, prevented, and/or treated with compositions of the invention include, but are not limited to, kidney failure, nephritis, blood vessel disorders of kidney, metabolic and congenital kidney disorders, urinary disorders of the kidney, autoimmune disorders, sclerosis and necrosis, electrolyte imbalance, and kidney cancers.

[2004] Kidney diseases which can be diagnosed, prognosed, prevented, and/or treated with compositions of the invention include, but are not limited to, acute kidney failure, chronic kidney failure, atheroembolic renal failure, end-stage renal disease, inflammatory diseases of the kidney (e.g., acute glomerulonephritis, postinfectious glomerulonephritis, rapidly progressive glomerulonephritis, nephrotic syndrome, membranous glomerulonephritis, familial nephrotic syndrome, membranoproliferative glomerulonephritis I and II, mesangial proliferative glomerulonephritis, chronic glomerulonephritis, acute tubulointerstitial nephritis, chronic tubulointerstitial nephritis, acute post-streptococcal glomerulonephritis (PSGN), pyelonephritis, lupus nephritis, chronic nephritis, interstitial nephritis, and post-streptococcal glomerulonephritis), blood vessel disorders of the kidneys (e.g., kidney infarction, atheroembolic kidney disease, cortical necrosis, malignant nephrosclerosis, renal vein thrombosis, renal underperfusion, renal retinopathy, renal ischemia-reperfusion, renal artery embolism, and renal artery stenosis), and kidney disorders resulting form urinary tract disease (e.g., pyelonephritis, hydronephrosis, urolithiasis (renal lithiasis, nephrolithiasis), reflux nephropathy, urinary tract infections, urinary retention, and acute or chronic unilateral obstructive uropathy.)

[2005] In addition, compositions of the invention can be used to diagnose, prognose, prevent, and/or treat metabolic and congenital disorders of the kidney (e.g., uremia, renal amyloidosis, renal osteodystrophy, renal tubular acidosis, renal glycosuria, nephrogenic diabetes insipidus, cystinuria, Fanconi's syndrome, renal fibrocystic osteosis (renal rickets), Hartnup disease, Bartter's syndrome, Liddle's syndrome, polycystic kidney disease, medullary cystic disease, medullary sponge kidney, Alport's syndrome, nail-patella syndrome, congenital nephrotic syndrome, CRUSH syndrome, horseshoe kidney, diabetic nephropathy, nephrogenic diabetes insipidus, analgesic nephropathy, kidney stones, and membranous nephropathy), and autoimmune disorders of the kidney (e.g., systemic lupus erythematosus (SLE), Goodpasture syndrome, IgA nephropathy, and IgM mesangial proliferative glomerulonephritis).

[2006] Compositions of the invention can also be used to diagnose, prognose, prevent, and/or treat sclerotic or necrotic disorders of the kidney (e.g., glomerulosclerosis, diabetic nephropathy, focal segmental glomerulosclerosis (FSGS), necrotizing glomerulonephritis, and renal papillary necrosis), cancers of the kidney (e.g., nephroma, hypemephroma, nephroblastoma, renal cell cancer, transitional cell cancer, renal adenocarcinoma, squamous cell cancer, and Wilm's tumor), and electrolyte imbalances (e.g., nephrocalcinosis, pyuria, edema, hydronephritis, proteinuria, hyponatremia, hypematremia, hypokalemia, hyperkalemia, hypocalcemia, hypercalcemia, hypophosphatemia, and hyperphosphatemia).

[2007] Polypeptides may be administered using any method known in the art, including, but not limited to, direct needle injection at the delivery site, intravenous injection, topical administration, catheter infusion, biolistic injectors, particle accelerators, gelfoam sponge depots, other commercially available depot materials, osmotic pumps, oral or suppositorial solid pharmaceutical formulations, decanting or topical applications during surgery, aerosol delivery. Such methods are known in the art. Polypeptides may be administered as part of a Therapeutic, described in more detail below. Methods of delivering polynucleotides are described in more detail herein.

[2008] Cardiovascular Disorders

[2009] Polynucleotides or polypeptides, or agonists or antagonists of the present invention, may be used to treat, prevent, diagnose, and/or prognose cardiovascular disorders, including, but not limited to, peripheral artery disease, such as limb ischemia.

[2010] Cardiovascular disorders include, but are not limited to, cardiovascular abnormalities, such as arterio-arterial fistula, arterioyenous fistula, cerebral arterioyenous malformations, congenital heart defects, pulmonary atresia, and Scimitar Syndrome. Congenital heart defects include, but are not limited to, aortic coarctation, cor triatriatum, coronary vessel anomalies, crisscross heart, dextrocardia, patent ductus arteriosus, Ebstein's anomaly, Eisenmenger complex, hypoplastic left heart syndrome, levocardia, tetralogy of fallot, transposition of great vessels, double outlet right ventricle, tricuspid atresia, persistent truncus aiteriosus, and heart septal defects, such as aortopulmonary septal defect, endocardial cushion defects, Lutembacher's Syndrome, trilogy of Fallot, ventricular heart septal defects.

[2011] Cardiovascular disorders also include, but are not limited to, heart disease, such as arrhythmias, carcinoid heart disease, high cardiac output, low cardiac output, cardiac tamponade, endocarditis (including bacterial), heart aneurysm, cardiac arrest, congestive heart failure, congestive cardiomyopathy, paroxysmal dyspnea, cardiac edema, heart hypertrophy, congestive cardiomyopathy, left ventricular hypertrophy, right ventricular hypertrophy, post-infarction heart rupture, ventricular septal rupture, heart valve diseases, myocardial diseases, myocardial ischemia, pericardial effusion, pericarditis (including constrictive and tuberculous), pneumopericardium, postpericardiotomy syndrome, pulmonary heart disease, rheumatic heart disease, ventricular dysfunction, hyperemia, cardiovascular pregnancy complications, Scimitar Syndrome, cardiovascular syphilis, and cardiovascular tuberculosis.

[2012] Arrhythmias include, but are not limited to, sinus arrhythmia, atrial fibrillation, atrial flutter, bradycardia, extrasystole, Adams-Stokes Syndrome, bundle-branch block, sinoatrial block, long QT syndrome, parasystole, Lown-Ganong-Levine Syndrome, Mahaim-type pre-excitation syndrome, Wolff-Parkinson-White syndrome, sick sinus syndrome, tachycardias, and ventricular fibrillation. Tachycardias include paroxysmal tachycardia, supraventricular tachycardia, accelerated idioventricular rhythm, atrioventricular nodal reentry tachycardia, ectopic atrial tachycardia, ectopic junctional tachycardia, sinoatrial nodal reentry tachycardia, sinus tachycardia, Torsades de Pointes, and ventricular tachycardia.

[2013] Heart valve diseases include, but are not limited to, aortic valve insufficiency, aortic valve stenosis, hear murmurs, aortic valve prolapse, mitral valve prolapse, tricuspid valve prolapse, mitral valve insufficiency, mitral valve stenosis, pulmonary atresia, pulmonary valve insufficiency, pulmonary valve stenosis, tricuspid atresia, tricuspid valve insufficiency, and tricuspid valve stenosis.

[2014] Myocardial diseases include, but are not limited to, alcoholic cardiomyopathy, congestive cardiomyopathy, hypertrophic cardiomyopathy, aortic subvalvular stenosis, pulmonary subvalvular stenosis, restrictive cardiomyopathy, Chagas cardiomyopathy, endocardial fibroelastosis, endomyocardial fibrosis, Kearns Syndrome, myocardial reperfusion injury, and myocarditis.

[2015] Myocardial ischemias include, but are not limited to, coronary disease, such as angina pectoris, coronary aneurysm, coronary arteriosclerosis, coronary thrombosis, coronary vasospasm, myocardial infarction and myocardial stunning.

[2016] Cardiovascular diseases also include vascular diseases such as aneurysms, angiodysplasia, angiomatosis, bacillary angiomatosis, Hippel-Lindau Disease, Klippel-Trenaunay-Weber Syndrome, Sturge-Weber Syndrome, angioneurotic edema, aortic diseases, Takayasu's Arteritis, aortitis, Leriche's Syndrome, arterial occlusive diseases, arteritis, enarteritis, polyarteritis nodosa, cerebrovascular disorders, diabetic angiopathies, diabetic retinopathy, embolisms, thrombosis, erythromelalgia, hemorrhoids, hepatic veno-occlusive disease, hypertension, hypotension, ischemia, peripheral vascular diseases, phlebitis, pulmonary veno-occlusive disease, Raynaud's disease, CREST syndrome, retinal vein occlusion, Scimitar syndrome, superior vena cava syndrome, telangiectasia, atacia telangiectasia, hereditary hemorrhagic telangiectasia, varicocele, varicose veins, varicose ulcer, vasculitis, and venous insufficiency.

[2017] Aneurysms include, but are not limited to, dissecting aneurysms, false aneurysms, infected aneurysms, ruptured aneurysms, aortic aneurysms, cerebral aneurysms, coronary aneurysms, heart aneurysms, and iliac aneurysms.

[2018] Arterial occlusive diseases include, but are not limited to, arteriosclerosis, intermittent claudication, carotid stenosis, fibromuscular dysplasias, mesenteric vascular occlusion, Moyamoya disease, renal artery obstruction, retinal artery occlusion, and thromboangiitis obliterans.

[2019] Cerebrovascular disorders include, but are not limited to, carotid artery diseases, cerebral amyloid angiopathy, cerebral aneurysm, cerebral anoxia, cerebral arteriosclerosis, cerebral arterioyenous malformation, cerebral artery diseases, cerebral embolism and thrombosis, carotid artery thrombosis, sinus thrombosis, Wallenberg's syndrome, cerebral hemorrhage, epidural hematoma, subdural hematoma, subaraxhnoid hemorrhage, cerebral infarction, cerebral ischemia (including transient), subclavian steal syndrome, periventricular leukomalacia, vascular headache, cluster headache, migraine, and vertebrobasilar insufficiency.

[2020] Embolisms include, but are not limited to, air embolisms, amniotic fluid embolisms, cholesterol embolisms, blue toe syndrome, fat embolisms, pulmonary embolisms, and thromoboembolisms. Thrombosis include, but are not limited to, coronary thrombosis, hepatic vein thrombosis, retinal vein occlusion, carotid artery thrombosis, sinus thrombosis, Wallenberg's syndrome, and thrombophlebitis.

[2021] Ischemic disorders include, but are not limited to, cerebral ischemia, ischemic colitis, compartment syndromes, anterior compartment syndrome, myocardial ischemia, reperfusion injuries, and peripheral limb ischemia. Vasculitis includes, but is not limited to, aortitis, arteritis, Behcet's Syndrome, Churg-Strauss Syndrome, mucocutaneous lymph node syndrome, thromboangiitis obliterans, hypersensitivity vasculitis, Schoenlein-Henoch purpura, allergic cutaneous vasculitis, and Wegener's granulomatosis.

[2022] Polypeptides may be administered using any method known in the art, including, but not limited to, direct needle injection at the delivery site, intravenous injection, topical administration, catheter infusion, biolistic injectors, particle accelerators, gelfoam sponge depots, other commercially available depot materials, osmotic pumps, oral or suppositorial solid pharmaceutical formulations, decanting or topical applications during surgery, aerosol delivery. Such methods are known in the art. Polypeptides may be administered as part of a Therapeutic, described in more detail below. Methods of delivering polynucleotides are described in more detail herein.

[2023] Respiratory Disorders

[2024] Polynucleotides or polypeptides, or agonists or antagonists of the present invention may be used to treat, prevent, diagnose, and/or prognose diseases and/or disorders of the respiratory system.

[2025] Diseases and disorders of the respiratory system include, but are not limited to, nasal vestibulitis, nonallergic rhinitis (e.g., acute rhinitis, chronic rhinitis, atrophic rhinitis, vasomotor rhinitis), nasal polyps, and sinusitis, juvenile angiofibromas, cancer of the nose and juvenile papillomas, vocal cord polyps, nodules (singer's nodules), contact ulcers, vocal cord paralysis, laryngoceles, pharyngitis (e.g., viral and bacterial), tonsillitis, tonsillar cellulitis, parapharyngeal abscess, laryngitis, laryngoceles, and throat cancers (e.g., cancer of the nasopharynx, tonsil cancer, larynx cancer), lung cancer (e.g., squamous cell carcinoma, small cell (oat cell) carcinoma, large cell carcinoma, and adenocarcinoma), allergic disorders (eosinophilic pneumonia, hypersensitivity pneumonitis (e.g., extrinsic allergic alveolitis, allergic interstitial pneumonitis, organic dust pneumoconiosis, allergic bronchopulmonary aspergillosis, asthma, Wegener's granulomatosis (granulomatous vasculitis), Goodpasture's syndrome)), pneumonia (e.g., bacterial pneumonia (e.g., Streptococcus pneumoniae (pneumoncoccal pneumonia), Staphylococcus aureus (staphylococcal pneumonia), Gram-negative bacterial pneumonia (caused by, e.g., Klebsiella and Pseudomas spp.), Mycoplasma pneumoniae pneumonia, Hemophilus influenzae pneumonia, Legionella pneumophila (Legionnaires' disease), and Chlamydia psittaci (Psittacosis)), and viral pneumonia (e.g., influenza, chickenpox (varicella).

[2026] Additional diseases and disorders of the respiratory system include, but are not limited to bronchiolitis, polio (poliomyelitis), croup, respiratory syncytial viral infection, mumps, erythema infectiosum (fifth disease), roseola infantum, progressive rubella panencephalitis, german measles, and subacute sclerosing panencephalitis), fungal pneumonia (e.g., Histoplasmosis, Coccidioidomycosis, Blastomycosis, fungal infections in people with severely suppressed immune systems (e.g., cryptococcosis, caused by Cryptococcus neoformans; aspergillosis, caused by Aspergillus spp.; candidiasis, caused by Candida; and mucormycosis)), Pneumocystis carinii (pneumocystis pneumonia), a typical pneumonias (e.g., Mycoplasma and Chlamydia spp.), opportunistic infection pneumonia, nosocomial pneumonia, chemical pneumonitis, and aspiration pneumonia, pleural disorders (e.g., pleurisy, pleural effusion, and pneumothorax (e.g., simple spontaneous pneumothorax, complicated spontaneous pneumothorax, tension pneumothorax)), obstructive airway diseases (e.g., asthma, chronic obstructive pulmonary disease (COPD), emphysema, chronic or acute bronchitis), occupational lung diseases (e.g., silicosis, black lung (coal workers' pneumoconiosis), asbestosis, berylliosis, occupational asthsma, byssinosis, and benign pneumoconioses), Infiltrative Lung Disease (e.g., pulmonary fibrosis (e.g., fibrosing alveolitis, usual interstitial pneumonia), idiopathic pulmonary fibrosis, desquamative interstitial pneumonia, lymphoid interstitial pneumonia, histiocytosis X (e.g., Letterer-Siwe disease, Hand-Schüller-Christian disease, eosinophilic granuloma), idiopathic pulmonary hemosiderosis, sarcoidosis and pulmonary alveolar proteinosis), Acute respiratory distress syndrome (also called, e.g., adult respiratory distress syndrome), edema, pulmonary embolism, bronchitis (e.g., viral, bacterial), bronchiectasis, atelectasis, lung abscess (caused by, e.g., Staphylococcus aureus or Legionella pneumophila), and cystic fibrosis.

[2027] Anti-Angiogenesis Activity

[2028] The naturally occurring balance between endogenous stimulators and inhibitors of angiogenesis is one in which inhibitory influences predominate. Rastinejad et al., Cell 56:345-355 (1989). In those rare instances in which neovascularization occurs under normal physiological conditions, such as wound healing, organ regeneration, embryonic development, and female reproductive processes, angiogenesis is stringently regulated and spatially and temporally delimited. Under conditions of pathological angiogenesis such as that characterizing solid tumor growth, these regulatory controls fail. Unregulated angiogenesis becomes pathologic and sustains progression of many neoplastic and non-neoplastic diseases. A number of serious diseases are dominated by abnormal neovascularization including solid tumor growth and metastases, arthritis, some types of eye disorders, and psoriasis. See, e.g., reviews by Moses et al., Biotech. 9:630-634 (1991); Folkman et al., N. Engl. J. Med., 333:1757-1763 (1995); Auerbach et al., J. Microvasc. Res. 29:401-411 (1985); Folkman, Advances in Cancer Research, eds. Klein and Weinhouse, Academic Press, New York, pp. 175-203 (1985); Patz, Am. J. Opthalmol. 94:715-743 (1982); and Folkman et al., Science 221:719-725 (1983). In a number of pathological conditions, the process of angiogenesis contributes to the disease state. For example, significant data have accumulated which suggest that the growth of solid tumors is dependent on angiogenesis. Folkman and Klagsbrun, Science 235:442-447 (1987).

[2029] The present invention provides for treatment of diseases or disorders associated with neovascularization by administration of the polynucleotides and/or polypeptides of the invention, as well as agonists or antagonists of the present invention. Malignant and metastatic conditions which can be treated with the polynucleotides and polypeptides, or agonists or antagonists of the invention include, but are not limited to, malignancies, solid tumors, and cancers described herein and otherwise known in the art (for a review of such disorders, see Fishman et al., Medicine, 2d Ed., J. B. Lippincott Co., Philadelphia (1985)). Thus, the present invention provides a method of treating an angiogenesis-related disease and/or disorder, comprising administering to an individual in need thereof a therapeutically effective amount of a polynucleotide, polypeptide, antagonist and/or agonist of the invention. For example, polynucleotides, polypeptides, antagonists and/or agonists may be utilized in a variety of additional methods in order to therapeutically treat a cancer or tumor. Cancers which may be treated with polynucleotides, polypeptides, antagonists and/or agonists include, but are not limited to solid tumors, including prostate, lung, breast, ovarian, stomach, pancreas, larynx, esophagus, testes, liver, parotid, biliary tract, colon, rectum, cervix, uterus, endometrium, kidney, bladder, thyroid cancer; primary tumors and metastases; melanomas; glioblastoma; Kaposi's sarcoma; leiomyosarcoma; non-small cell lung cancer; colorectal cancer; advanced malignancies; and blood born tumors such as leukemias. For example, polynucleotides, polypeptides, antagonists and/or agonists may be delivered topically, in order to treat cancers such as skin cancer, head and neck tumors, breast tumors, and Kaposi's sarcoma.

[2030] Within yet other aspects, polynucleotides, polypeptides, antagonists and/or agonists may be utilized to treat superficial forms of bladder cancer by, for example, intravesical administration. Polynucleotides, polypeptides, antagonists and/or agonists may be delivered directly into the tumor, or near the tumor site, via injection or a catheter. Of course, as the artisan of ordinary skill will appreciate, the appropriate mode of administration will vary according to the cancer to be treated. Other modes of delivery are discussed herein.

[2031] Polynucleotides, polypeptides, antagonists and/or agonists may be useful in treating other disorders, besides cancers, which involve angiogenesis. These disorders include, but are not limited to: benign tumors, for example hemangiomas, acoustic neuromas, neurofibromas, trachomas, and pyogenic granulomas; artheroscleric plaques; ocular angiogenic diseases, for example, diabetic retinopathy, retinopathy of prematurity, macular degeneration, comeal graft rejection, neovascular glaucoma, retrolental fibroplasia, rubeosis, retinoblastoma, uvietis and Pterygia (abnormal blood vessel growth) of the eye; rheumatoid arthritis; psoriasis; delayed wound healing; endometriosis; vasculogenesis; granulations; hypertrophic scars (keloids); nonunion fractures; scleroderma; trachoma; vascular adhesions; myocardial angiogenesis; coronary collaterals; cerebral collaterals; arterioyenous malformations; ischemic limb angiogenesis; Osler-Webber Syndrome; plaque neovascularization; telangiectasia; hemophiliac joints; angiofibroma; fibromuscular dysplasia; wound granulation; Crohn's disease; and atherosclerosis.

[2032] For example, within one aspect of the present invention methods are provided for treating hypertrophic scars and keloids, comprising the step of administering a polynucleotide, polypeptide, antagonist and/or agonist of the invention to a hypertrophic scar or keloid.

[2033] Within one embodiment of the present invention polynucleotides, polypeptides, antagonists and/or agonists of the invention are directly injected into a hypertrophic scar or keloid, in order to prevent the progression of these lesions. This therapy is of particular value in the prophylactic treatment of conditions which are known to result in the development of hypertrophic scars and keloids (e.g., burns), and is preferably initiated after the proliferative phase has had time to progress (approximately 14 days after the initial injury), but before hypertrophic scar or keloid development. As noted above, the present invention also provides methods for treating neovascular diseases of the eye, including for example, comeal neovascularization, neovascular glaucoma, proliferative diabetic retinopathy, retrolental fibroplasia and macular degeneration.

[2034] Moreover, Ocular disorders associated with neovascularization which can be treated with the polynucleotides and polypeptides of the present invention (including agonists and/or antagonists) include, but are not limited to: neovascular glaucoma, diabetic retinopathy, retinoblastoma, retrolental fibroplasia, uveitis, retinopathy of prematurity macular degeneration, comeal graft neovascularization, as well as other eye inflammatory diseases, ocular tumors and diseases associated with choroidal or iris neovascularization. See, e.g., reviews by Waltman et al., Am. J. Ophthal. 85:704-710 (1978) and Gartner et al., Surv. Ophthal. 22:291-312 (1978).

[2035] Thus, within one aspect of the present invention methods are provided for treating neovascular diseases of the eye such as corneal neovascularization (including corneal graft neovascularization), comprising the step of administering to a patient a therapeutically effective amount of a compound (as described above) to the cornea, such that the formation of blood vessels is inhibited. Briefly, the cornea is a tissue which normally lacks blood vessels. In certain pathological conditions however, capillaries may extend into the cornea from the pericorneal vascular plexus of the limbus. When the cornea becomes vascularized, it also becomes clouded, resulting in a decline in the patient's visual acuity. Visual loss may become complete if the cornea completely opacitates. A wide variety of disorders can result in corneal neovascularization, including for example, corneal infections (e.g., trachoma, herpes simplex keratitis, leishmaniasis and onchocerciasis), immunological processes (e.g., graft rejection and Stevens-Johnson's syndrome), alkali burns, trauma, inflammation (of any cause), toxic and nutritional deficiency states, and as a complication of wearing contact lenses.

[2036] Within particularly preferred embodiments of the invention, may be prepared for topical administration in saline (combined with any of the preservatives and antimicrobial agents commonly used in ocular preparations), and administered in eyedrop form. The solution or suspension may be prepared in its pure form and administered several times daily. Alternatively, anti-angiogenic compositions, prepared as described above, may also be administered directly to the cornea. Within preferred embodiments, the anti-angiogenic composition is prepared with a muco-adhesive polymer which binds to cornea. Within further embodiments, the anti-angiogenic factors or anti-angiogenic compositions may be utilized as an adjunct to conventional steroid therapy. Topical therapy may also be useful prophylactically in corneal lesions which are known to have a high probability of inducing an angiogenic response (such as chemical burns). In these instances the treatment, likely in combination with steroids, may be instituted immediately to help prevent subsequent complications.

[2037] Within other embodiments, the compounds described above may be injected directly into the corneal stroma by an ophthalmologist under microscopic guidance. The preferred site of injection may vary with the morphology of the individual lesion, but the goal of the administration would be to place the composition at the advancing front of the vasculature (i.e., interspersed between the blood vessels and the normal cornea). In most cases this would involve perilimbic corneal injection to “protect” the cornea from the advancing blood vessels. This method may also be utilized shortly after a corneal insult in order to prophylactically prevent corneal neovascularization. In this situation the material could be injected in the perilimbic cornea interspersed between the corneal lesion and its undesired potential limbic blood supply. Such methods may also be utilized in a similar fashion to prevent capillary invasion of transplanted corneas. In a sustained-release form injections might only be required 2-3 times per year. A steroid could also be added to the injection solution to reduce inflammation resulting from the injection itself.

[2038] Within another aspect of the present invention, methods are provided for treating neovascular glaucoma, comprising the step of administering to a patient a therapeutically effective amount of a polynucleotide, polypeptide, antagonist and/or agonist to the eye, such that the formation of blood vessels is inhibited. In one embodiment, the compound may be administered topically to the eye in order to treat early forms of neovascular glaucoma. Within other embodiments, the compound may be implanted by injection into the region of the anterior chamber angle. Within other embodiments, the compound may also be placed in any location such that the compound is continuously released into the aqueous humor. Within another aspect of the present invention, methods are provided for treating proliferative diabetic retinopathy, comprising the step of administering to a patient a therapeutically effective amount of a polynucleotide, polypeptide, antagonist and/or agonist to the eyes, such that the formation of blood vessels is inhibited.

[2039] Within particularly preferred embodiments of the invention, proliferative diabetic retinopathy may be treated by injection into the aqueous humor or the vitreous, in order to increase the local concentration of the polynucleotide, polypeptide, antagonist and/or agonist in the retina. Preferably, this treatment should be initiated prior to the acquisition of severe disease requiring photocoagulation.

[2040] Within another aspect of the present invention, methods are provided for treating retrolental fibroplasia, comprising the step of administering to a patient a therapeutically effective amount of a polynucleotide, polypeptide, antagonist and/or agonist to the eye, such that the formation of blood vessels is inhibited. The compound may be administered topically, via intravitreous injection and/or via intraocular implants.

[2041] Additionally, disorders which can be treated with the polynucleotides, polypeptides, agonists and/or agonists include, but are not limited to, hemangioma, arthritis, psoriasis, angiofibroma, atherosclerotic plaques, delayed wound healing, granulations, hemophilic joints, hypertrophic scars, nonunion fractures, Osler-Weber syndrome, pyogenic granuloma, scleroderma, trachoma, and vascular adhesions.

[2042] Moreover, disorders and/or states, which can be treated, prevented, diagnosed, and/or prognosed with the the polynucleotides, polypeptides, agonists and/or agonists of the invention include, but are not limited to, solid tumors, blood born tumors such as leukemias, tumor metastasis, Kaposi's sarcoma, benign tumors, for example hemangiomas, acoustic neuromas, neurofibromas, trachomas, and pyogenic granulomas, rheumatoid arthritis, psoriasis, ocular angiogenic diseases, for example, diabetic retinopathy, retinopathy of prematurity, macular degeneration, corneal graft rejection, neovascular glaucoma, retrolental fibroplasia, rubeosis, retinoblastoma, and uvietis, delayed wound healing, endometriosis, vascluogenesis, granulations, hypertrophic scars (keloids), nonunion fractures, scleroderma, trachoma, vascular adhesions, myocardial angiogenesis, coronary collaterals, cerebral collaterals, arterioyenous malformations, ischemic limb angiogenesis, Osler-Webber Syndrome, plaque neovascularization, telangiectasia, hemophiliac joints, angiofibroma fibromuscular dysplasia, wound granulation, Crohn's disease, atherosclerosis, birth control agent by preventing vascularization required for embryo implantation controlling menstruation, diseases that have angiogenesis as a pathologic consequence such as cat scratch disease (Rochele minalia quintosa), ulcers (Helicobacter pylori), Bartonellosis and bacillary angiomatosis.

[2043] In one aspect of the birth control method, an amount of the compound sufficient to block embryo implantation is administered before or after intercourse and fertilization have occurred, thus providing an effective method of birth control, possibly a “morning after” method. Polynucleotides, polypeptides, agonists and/or agonists may also be used in controlling menstruation or administered as either a peritoneal lavage fluid or for peritoneal implantation in the treatment of endometriosis.

[2044] Polynucleotides, polypeptides, agonists and/or agonists of the present invention may be incorporated into surgical sutures in order to prevent stitch granulomas.

[2045] Polynucleotides, polypeptides, agonists and/or agonists may be utilized in a wide variety of surgical procedures. For example, within one aspect of the present invention a compositions (in the form of, for example, a spray or film) may be utilized to coat or spray an area prior to removal of a tumor, in order to isolate normal surrounding tissues from malignant tissue, and/or to prevent the spread of disease to surrounding tissues. Within other aspects of the present invention, compositions (e.g., in the form of a spray) may be delivered via endoscopic procedures in order to coat tumors, or inhibit angiogenesis in a desired locale. Within yet other aspects of the present invention, surgical meshes which have been coated with anti-angiogenic compositions of the present invention may be utilized in any procedure wherein a surgical mesh might be utilized. For example, within one embodiment of the invention a surgical mesh laden with an anti-angiogenic composition may be utilized during abdominal cancer resection surgery (e.g., subsequent to colon resection) in order to provide support to the structure, and to release an amount of the anti-angiogenic factor.

[2046] Within further aspects of the present invention, methods are provided for treating tumor excision sites, comprising administering a polynucleotide, polypeptide, agonist and/or agonist to the resection margins of a tumor subsequent to excision, such that the local recurrence of cancer and the formation of new blood vessels at the site is inhibited. Within one embodiment of the invention, the anti-angiogenic compound is administered directly to the tumor excision site (e.g., applied by swabbing, brushing or otherwise coating the resection margins of the tumor with the anti-angiogenic compound). Alternatively, the anti-angiogenic compounds may be incorporated into known surgical pastes prior to administration. Within particularly preferred embodiments of the invention, the anti-angiogenic compounds are applied after hepatic resections for malignancy, and after neurosurgical operations.

[2047] Within one aspect of the present invention, polynucleotides, polypeptides, agonists and/or agonists may be administered to the resection margin of a wide variety of tumors, including for example, breast, colon, brain and hepatic tumors. For example, within one embodiment of the invention, anti-angiogenic compounds may be administered to the site of a neurological tumor subsequent to excision, such that the formation of new blood vessels at the site are inhibited.

[2048] The polynucleotides, polypeptides, agonists and/or agonists of the present invention may also be administered along with other anti-angiogenic factors. Representative examples of other anti-angiogenic factors include: Anti-Invasive Factor, retinoic acid and derivatives thereof, paclitaxel, Suramin, Tissue Inhibitor of Metalloproteinase-1, Tissue Inhibitor of Metalloproteinase-2, Plasminogen Activator Inhibitor-1, Plasminogen Activator Inhibitor-2, and various forms of the lighter “d group” transition metals.

[2049] Lighter “d group” transition metals include, for example, vanadium, molybdenum, tungsten, titanium, niobium, and tantalum species. Such transition metal species may form transition metal complexes. Suitable complexes of the above-mentioned transition metal species include oxo transition metal complexes.

[2050] Representative examples of vanadium complexes include oxo vanadium complexes such as vanadate and vanadyl complexes. Suitable vanadate complexes include metavanadate and orthovanadate complexes such as, for example, ammonium metavanadate, sodium metavanadate, and sodium orthovanadate. Suitable vanadyl complexes include, for example, vanadyl acetylacetonate and vanadyl sulfate including vanadyl sulfate hydrates such as vanadyl sulfate mono- and trihydrates.

[2051] Representative examples of tungsten and molybdenum complexes also include oxo complexes. Suitable oxo tungsten complexes include tungstate and tungsten oxide complexes. Suitable tungstate complexes include ammonium tungstate, calcium tungstate, sodium tungstate dihydrate, and tungstic acid. Suitable tungsten oxides include tungsten (IV) oxide and tungsten (VI) oxide. Suitable oxo molybdenum complexes include molybdate, molybdenum. oxide, and molybdenyl complexes. Suitable molybdate complexes include ammonium molybdate and its hydrates, sodium molybdate and its hydrates, and potassium molybdate and its hydrates. Suitable molybdenum oxides include molybdenum (VI) oxide, molybdenum (VI) oxide, and molybdic acid. Suitable molybdenyl complexes include, for example, molybdenyl acetylacetonate. Other suitable tungsten and molybdenum complexes include hydroxo derivatives derived from, for example, glycerol, tartaric acid, and sugars.

[2052] A wide variety of other anti-angiogenic factors may also be utilized within the context of the present invention. Representative examples include platelet factor 4; protamine sulphate; sulphated chitin derivatives (prepared from queen crab shells), (Murata et al., Cancer Res. 51:22-26, 1991); Sulphated Polysaccharide Peptidoglycan Complex (SP-PG) (the function of this compound may be enhanced by the presence of steroids such as estrogen, and tamoxifen citrate); Staurosporine; modulators of matrix metabolism, including for example, proline analogs, cishydroxyproline, d,L-3,4-dehydroproline, Thiaproline, alpha,alpha-dipyridyl, aminopropionitrile fumarate; 4-propyl-5-(4-pyridinyl)-2(3H)-oxazolone; Methotrexate; Mitoxantrone; Heparin; Interferons; 2 Macroglobulin-serum; ChIMP-3 (Pavloff et al., J. Bio. Chem. 267:17321-17326, 1992); Chymostatin (Tomkinson et al., Biochem J. 286:475-480, 1992); Cyclodextrin Tetradecasulfate; Eponemycin; Camptothecin; Fumagillin (Ingber et al., Nature 348:555-557, 1990); Gold Sodium Thiomalate (“GST”; Matsubara and Ziff, J. Clin. Invest. 79:1440-1446, 1987); anticollagenase-serum; alpha2-antiplasmin (Holmes et al., J. Biol. Chem. 262(4):1659-1664, 1987); Bisantrene (National Cancer Institute); Lobenzarit disodium (N-(2)-carboxyphenyl-4-chloroanthronilic acid disodium or “CCA”; Takeuchi et al., Agents Actions 36:312-316, 1992); Thalidomide; Angostatic steroid; AGM-1470; carboxynaminolmidazole; and metalloproteinase inhibitors such as BB94.

[2053] Diseases at the Cellular Level

[2054] Diseases associated with increased cell survival or the inhibition of apoptosis that could be treated, prevented, diagnosed, and/or prognosed using polynucleotides or polypeptides, as well as antagonists or agonists of the present invention, include cancers (such as follicular lymphomas, carcinomas with p53 mutations, and hormone-dependent tumors, including, but not limited to colon cancer, cardiac tumors, pancreatic cancer, melanoma, retinoblastoma, glioblastoma, lung cancer, intestinal cancer, testicular cancer, stomach cancer, neuroblastoma, myxoma, myoma, lymphoma, endothelioma, osteoblastoma, osteoclastoma, osteosarcoma, chondrosarcoma, adenoma, breast cancer, prostate cancer, Kaposi's sarcoma and ovarian cancer); autoimmune disorders (such as, multiple sclerosis, Sjogren's syndrome, Hashimoto's thyroiditis, biliary cirrhosis, Behcet's disease, Crohn's disease, polymyositis, systemic lupus erythematosus and immune-related glomerulonephritis and rheumatoid arthritis) and viral infections (such as herpes viruses, pox viruses and adenoviruses), inflammation, graft v. host disease, acute graft rejection, and chronic graft rejection.

[2055] In preferred embodiments, polynucleotides, polypeptides, and/or antagonists of the invention are used to inhibit growth, progression, and/or metasis of cancers, in particular those listed above.

[2056] Additional diseases or conditions associated with increased cell survival that could be treated or detected by polynucleotides or polypeptides, or agonists or antagonists of the present invention include, but are not limited to, progression, and/or metastases of malignancies and related disorders such as leukemia (including acute leukemias (e.g., acute lymphocytic leukemia, acute myelocytic leukemia (including myeloblastic, promyelocytic, myelomonocytic, monocytic, and erythroleukemia)) and chronic leukemias (e.g., chronic myelocytic (granulocytic) leukemia and chronic lymphocytic leukemia)), polycythemia vera, lymphomas (e.g., Hodgkin's disease and non-Hodgkin's disease), multiple myeloma, Waldenstrom's macroglobulinemia, heavy chain disease, and solid tumors including, but not limited to, sarcomas and carcinomas such as fibrosarcoma, myxosarcoma, liposarcoma, chondrosarcoma, osteogenic sarcoma, chordoma, angiosarcoma, endotheliosarcoma, lymphangiosarcoma, lymphangioendotheliosarcoma, synovioma, mesothelioma, Ewing's tumor, leiomyosarcoma, rhabdomyosarcoma, colon carcinoma, pancreatic cancer, breast cancer, ovarian cancer, prostate cancer, squamous cell carcinoma, basal cell carcinoma, adenocarcinoma, sweat gland carcinoma, sebaceous gland carcinoma, papillary carcinoma, papillary adenocarcinomas, cystadenocarcinoma, medullary carcinoma, bronchogenic carcinoma, renal cell carcinoma, hepatoma, bile duct carcinoma, choriocarcinoma, seminoma, embryonal carcinoma, Wilm's tumor, cervical cancer, testicular tumor, lung carcinoma, small cell lung carcinoma, bladder carcinoma, epithelial carcinoma, glioma, astrocytoma, medulloblastoma, craniopharyngioma, ependymoma, pinealoma, hemangioblastoma, acoustic neuroma, oligodendroglioma, menangioma, melanoma, neuroblastoma, and retinoblastoma.

[2057] Diseases associated with increased apoptosis that could be treated, prevented, diagnosed, and/or prognesed using polynucleotides or polypeptides, as well as agonists or antagonists of the present invention, include, but are not limited to, AIDS; neurodegenerative disorders (such as Alzheimer's disease, Parkinson's disease, Amyotrophic lateral sclerosis, Retinitis pigrnentosa, Cerebellar degeneration and brain tumor or prior associated disease); autoimmune disorders (such as, multiple sclerosis, Sjogren's syndrome, Hashimoto's thyroiditis, biliary cirrhosis, Behcet's disease, Crohn's disease, polymyositis, systemic lupus erythematosus and immune-related glomerulonephritis and rheumatoid arthritis) myelodysplastic syndromes (such as aplastic anemia), graft v. host disease, ischemic injury (such as that caused by myocardial infarction, stroke and reperfusion injury), liver injury (e.g., hepatitis related liver injury, ischemia/reperfusion injury, cholestosis (bile duct injury) and liver cancer); toxin-induced liver disease (such as that caused by alcohol), septic shock, cachexia and anorexia.

[2058] Wound Healing and Epithelial Cell Proliferation

[2059] In accordance with yet a further aspect of the present invention, there is provided a process for utilizing polynucleotides or polypeptides, as well as agonists or antagonists of the present invention, for therapeutic purposes, for example, to stimulate epithelial cell proliferation and basal keratinocytes for the purpose of wound healing, and to stimulate hair follicle production and healing of dermal wounds. Polynucleotides or polypeptides, as well as agonists or antagonists of the present invention, may be clinically useful in stimulating wound healing including surgical wounds, excisional wounds, deep wounds involving damage of the dermis and epidermis, eye tissue wounds, dental tissue wounds, oral cavity wounds, diabetic ulcers, dermal ulcers, cubitus ulcers, arterial ulcers, venous stasis ulcers, burns resulting from heat exposure or chemicals, and other abnormal wound healing conditions such as uremia, malnutrition, vitamin deficiencies and complications associated with systemic treatment with steroids, radiation therapy and antineoplastic drugs and antimetabolites. Polynucleotides or polypeptides, as well as agonists or antagonists of the present invention, could be used to promote dermal reestablishment subsequent to dermal loss

[2060] Polynucleotides or polypeptides, as well as agonists or antagonists of the present invention, could be used to increase the adherence of skin grafts to a wound bed and to stimulate re-epithelialization from the wound bed. The following are types of grafts that polynucleotides or polypeptides, agonists or antagonists of the present invention, could be used to increase adherence to a wound bed: autografts, artificial skin, allografts, autodermic graft, autoepdermic grafts, avacular grafts, Blair-Brown grafts, bone graft, brephoplastic grafts, cutis graft, delayed graft, dermic graft, epidermic graft, fascia graft, full thickness graft, heterologous graft, xenograft, homologous graft, hyperplastic graft, lamellar graft, mesh graft, mucosal graft, Ollier-Thiersch graft, omenpal graft, patch graft, pedicle graft, penetrating graft, split skin graft, thick split graft. Polynucleotides or polypeptides, as well as agonists or antagonists of the present invention, can be used to promote skin strength and to improve the appearance of aged skin.

[2061] It is believed that polynucleotides or polypeptides, as well as agonists or antagonists of the present invention, will also produce changes in hepatocyte proliferation, and epithelial cell proliferation in the lung, breast, pancreas, stomach, small intestine, and large intestine. Polynucleotides or polypeptides, as well as agonists or antagonists of the present invention, could promote proliferation of epithelial cells such as sebocytes, hair follicles, hepatocytes, type II pneumocytes, mucin-producing goblet cells, and other epithelial cells and their progenitors contained within the skin, lung, liver, and gastrointestinal tract. Polynucleotides or polypeptides, agonists or antagonists of the present invention, may promote proliferation of endothelial cells, keratinocytes, and basal keratinocytes.

[2062] Polynucleotides or polypeptides, as well as agonists or antagonists of the present invention, could also be used to reduce the side effects of gut toxicity that result from radiation, chemotherapy treatments or viral infections. Polynucleotides or polypeptides, as well as agonists or antagonists of the present invention, may have a cytoprotective effect on the small intestine mucosa. Polynucleotides or polypeptides, as well as agonists or antagonists of the present invention, may also stimulate healing of mucositis (mouth ulcers) that result from chemotherapy and viral infections.

[2063] Polynucleotides or polypeptides, as well as agonists or antagonists of the present invention, could further be used in full regeneration of skin in full and partial thickness skin defects, including burns, (i.e., repopulation of hair follicles, sweat glands, and sebaceous glands), treatment of other skin defects such as psoriasis. Polynucleotides or polypeptides, as well as agonists or antagonists of the present invention, could be used to treat epidermolysis bullosa, a defect in adherence of the epidermis to the underlying dermis which results in frequent, open and painful blisters by accelerating reepithelialization of these lesions. Polynucleotides or polypeptides, as well as agonists or antagonists of the present invention, could also be used to treat gastric and doudenal ulcers and help heal by scar formation of the mucosal lining and regeneration of glandular mucosa and duodenal mucosal lining more rapidly. Inflammatory bowel diseases, such as Crohn's disease and ulcerative colitis, are diseases which result in destruction of the mucosal surface of the small or large intestine, respectively. Thus, polynucleotides or polypeptides, as well as agonists or antagonists of the present invention, could be used to promote the resurfacing of the mucosal surface to aid more rapid healing and to prevent progression of inflammatory bowel disease. Treatment with polynucleotides or polypeptides, agonists or antagonists of the present invention, is expected to have a significant effect on the production of mucus throughout the gastrointestinal tract and could be used to protect the intestinal mucosa from injurious substances that are ingested or following surgery. Polynucleotides or polypeptides, as well as agonists or antagonists of the present invention, could be used to treat diseases associate with the under expression.

[2064] Moreover, polynucleotides or polypeptides, as well as agonists or antagonists of the present invention, could be used to prevent and heal damage to the lungs due to various pathological states. Polynucleotides or polypeptides, as well as agonists or antagonists of the present invention, which could stimulate proliferation and differentiation and promote the repair of alveoli and brochiolar epithelium to prevent or treat acute or chronic lung damage. For example, emphysema, which results in the progressive loss of aveoli, and inhalation injuries, i.e., resulting from smoke inhalation and burns, that cause necrosis of the bronchiolar epithelium and alveoli could be effectively treated using polynucleotides or polypeptides, agonists or antagonists of the present invention. Also, polynucleotides or polypeptides, as well as agonists or antagonists of the present invention, could be used to stimulate the proliferation of and differentiation of type II pneumocytes, which may help treat or prevent disease such as hyaline membrane diseases, such as infant respiratory distress syndrome and bronchopulmonary displasia, in premature infants.

[2065] Polynucleotides or polypeptides, as well as agonists or antagonists of the present invention, could stimulate the proliferation and differentiation of hepatocytes and, thus, could be used to alleviate or treat liver diseases and pathologies such as fulminant liver failure caused by cirrhosis, liver damage caused by viral hepatitis and toxic substances (i.e., acetaminophen, carbon tetraholoride and other hepatotoxins known in the art).

[2066] In addition, polynucleotides or polypeptides, as well as agonists or antagonists of the present invention, could be used treat or prevent the onset of diabetes mellitus. In patients with newly diagnosed Types I and II diabetes, where some islet cell function remains, polynucleotides or polypeptides, as well as agonists or antagonists of the present invention, could be used to maintain the islet function so as to alleviate, delay or prevent permanent manifestation of the disease. Also, polynucleotides or polypeptides, as well as agonists or antagonists of the present invention, could be used as an auxiliary in islet cell transplantation to improve or promote islet cell function.

[2067] Neural Activity and Neurological Diseases

[2068] The polynucleotides, polypeptides and agonists or antagonists of the invention may be used for the diagnosis and/or treatment of diseases, disorders, damage or injury of the brain and/or nervous system. Nervous system disorders that can be treated with the compositions of the invention (e.g., polypeptides, polynucleotides, and/or agonists or antagonists), include, but are not limited to, nervous system injuries, and diseases or disorders which result in either a disconnection of axons, a diminution or degeneration of neurons, or demyelination. Nervous system lesions which may be treated in a patient (including human and non-human mammalian patients) according to the methods of the invention, include but are not limited to, the following lesions of either the central (including spinal cord, brain) or peripheral nervous systems: (1) ischemic lesions, in which a lack of oxygen in a portion of the nervous system results in neuronal injury or death, including cerebral infarction or ischemia, or spinal cord infarction or ischemia; (2) traumatic lesions, including lesions caused by physical injury or associated with surgery, for example, lesions which sever a portion of the nervous system, or compression injuries; (3) malignant lesions, in which a portion of the nervous system is destroyed or injured by malignant tissue which is either a nervous system associated malignancy or a malignancy derived from non-nervous system tissue; (4) infectious lesions, in which a portion of the nervous system is destroyed or injured as a result of infection, for example, by an abscess or associated with infection by human immunodeficiency virus, herpes zoster, or herpes simplex virus or with Lyme disease, tuberculosis, or syphilis; (5) degenerative lesions, in which a portion of the nervous system is destroyed or injured as a result of a degenerative process including but not limited to, degeneration associated with Parkinson's disease, Alzheimer's disease, Huntington's chorea, or amyotrophic lateral sclerosis (ALS); (6) lesions associated with nutritional diseases or disorders, in which a portion of the nervous system is destroyed or injured by a nutritional disorder or disorder of metabolism including, but not limited to, vitamin B12 deficiency, folic acid deficiency, Wernicke disease, tobacco-alcohol amblyopia, Marchiafava-Bignami disease (primary degeneration of the corpus callosum), and alcoholic cerebellar degeneration; (7) neurological lesions associated with systemic diseases including, but not limited to, diabetes (diabetic neuropathy, Bell's palsy), systemic lupus erythematosus, carcinoma, or sarcoidosis; (8) lesions caused by toxic substances including alcohol, lead, or particular neurotoxins; and (9) demyelinated lesions in which a portion of the nervous system is destroyed or injured by a demyelinating disease including, but not limited to, multiple sclerosis, human immunodeficiency virus-associated myelopathy, transverse myelopathy or various etiologies, progressive multifocal leukoencephalopathy, and central pontine myelinolysis.

[2069] In one embodiment, the polypeptides, polynucleotides, or agonists or antagonists of the invention are used to protect neural cells from the damaging effects of hypoxia. In a further preferred embodiment, the polypeptides, polynucleotides, or agonists or antagonists of the invention are used to protect neural cells from the damaging effects of cerebral hypoxia. According to this embodiment, the compositions of the invention are used to treat or prevent neural cell injury associated with cerebral hypoxia. In one non-exclusive aspect of this embodiment, the polypeptides, polynucleotides, or agonists or antagonists of the invention, are used to treat or prevent neural cell injury associated with cerebral ischemia. In another non-exclusive aspect of this embodiment, the polypeptides, polynucleotides, or agonists or antagonists of the invention are used to treat or prevent neural cell injury associated with cerebral infarction.

[2070] In another preferred embodiment, the polypeptides, polynucleotides, or agonists or antagonists of the invention are used to treat or prevent neural cell injury associated with a stroke. In a specific embodiment, the polypeptides, polynucleotides, or agonists or antagonists of the invention are used to treat or prevent cerebral neural cell injury associated with a stroke.

[2071] In another preferred embodiment, the polypeptides, polynucleotides, or agonists or antagonists of the invention are used to treat or prevent neural cell injury associated with a heart attack. In a specific embodiment, the polypeptides, polynucleotides, or agonists or antagonists of the invention are used to treat or prevent cerebral neural cell injury associated with a heart attack.

[2072] The compositions of the invention which are useful for treating or preventing a nervous system disorder may be selected by testing for biological activity in promoting the survival or differentiation of neurons. For example, and not by way of limitation, compositions of the invention which elicit any of the following effects may be useful according to the invention: (1) increased survival time of neurons in culture either in the presence or absence of hypoxia or hypoxic conditions; (2) increased sprouting of neurons in culture or in vivo; (3) increased production of a neuron-associated molecule in culture or in vivo, e.g., choline acetyltransferase or acetylcholinesterase with respect to motor neurons; or (4) decreased symptoms of neuron dysfunction in vivo. Such effects may be measured by any method known in the art. In preferred, non-limiting embodiments, increased survival of neurons may routinely be measured using a method set forth herein or otherwise known in the art, such as, for example, in Zhang et al., Proc Natl Acad Sci USA 97:3637-42 (2000) or in Arakawa et al., J. Neurosci., 10:3507-15 (1990); increased sprouting of neurons may be detected by methods known in the art, such as, for example, the methods set forth in Pestronk et al., Exp. Neurol., 70:65-82 (1980), or Brown et al., Ann. Rev. Neurosci., 4:17-42 (1981); increased production of neuron-associated molecules may be measured by bioassay, enzymatic assay, antibody binding, Northern blot assay, etc., using techniques known in the art and depending on the molecule to be measured; and motor neuron dysfunction may be measured by assessing the physical manifestation of motor neuron disorder, e.g., weakness, motor neuron conduction velocity, or functional disability.

[2073] In specific embodiments, motor neuron disorders that may be treated according to the invention include, but are not limited to, disorders such as infarction, infection, exposure to toxin, trauma, surgical damage, degenerative disease or malignancy that may affect motor neurons as well as other components of the nervous system, as well as disorders that selectively affect neurons such as amyotrophic lateral sclerosis, and including, but not limited to, progressive spinal muscular atrophy, progressive bulbar palsy, primary lateral sclerosis, infantile and juvenile muscular atrophy, progressive bulbar paralysis of childhood (Fazio-]Londe syndrome), poliomyelitis and the post polio syndrome, and Hereditary Motorsensory Neuropathy (Charcot-Marie-Tooth Disease).

[2074] Further, polypeptides or polynucleotides of the invention may play a role in neuronal survival; synapse formation; conductance; neural differentiation, etc. Thus, compositions of the invention (including polynucleotides, polypeptides, and agonists or antagonists) may be used to diagnose and/or treat or prevent diseases or disorders associated with these roles, including, but not limited to, learning and/or cognition disorders. The compositions of the invention may also be useful in the treatment or prevention of neurodegenerative disease states and/or behavioural disorders. Such neurodegenerative disease states and/or behavioral disorders include, but are not limited to, Alzheimer's Disease, Parkinson's Disease, Huntington's Disease, Tourette Syndrome, schizophrenia, mania, dementia, paranoia, obsessive compulsive disorder, panic disorder, learning disabilities, ALS, psychoses, autism, and altered behaviors, including disorders in feeding, sleep patterns, balance, and perception. In addition, compositions of the invention may also play a role in the treatment, prevention and/or detection of developmental disorders associated with the developing embryo, or sexually-linked disorders.

[2075] Additionally, polypeptides, polynucleotides and/or agonists or antagonists of the invention, may be useful in protecting neural cells from diseases, damage, disorders, or injury, associated with cerebrovascular disorders including, but not limited to, carotid artery diseases (e.g., carotid artery thrombosis, carotid stenosis, or Moyamoya Disease), cerebral amyloid angiopathy, cerebral aneurysm, cerebral anoxia, cerebral arteriosclerosis, cerebral arterioyenous malformations, cerebral artery diseases, cerebral embolism and thrombosis (e.g., carotid artery thrombosis, sinus thrombosis, or Wallenberg's Syndrome), cerebral hemorrhage (e.g., epidural or subdural hematoma, or subarachnoid hemorrhage), cerebral infarction, cerebral ischemia (e.g., transient cerebral ischemia, Subclavian Steal Syndrome, or vertebrobasilar insufficiency), vascular dementia (e.g., multi-infarct), leukomalacia, periventricular, and vascular headache (e.g., cluster headache or migraines).

[2076] In accordance with yet a further aspect of the present invention, there is provided a process for utilizing polynucleotides or polypeptides, as well as agonists or antagonists of the present invention, for therapeutic purposes, for example, to stimulate neurological cell proliferation and/or differentiation. Therefore, polynucleotides, polypeptides, agonists and/or antagonists of the invention may be used to treat and/or detect neurologic diseases. Moreover, polynucleotides or polypeptides, or agonists or antagonists of the invention, can be used as a marker or detector of a particular nervous system disease or disorder.

[2077] Examples of neurologic diseases which can be treated or detected with polynucleotides, polypeptides, agonists, and/or antagonists of the present invention include brain diseases, such as metabolic brain diseases which includes phenylketonuria such as maternal phenylketonuria, pyruvate carboxylase deficiency, pyruvate dehydrogenase complex deficiency, Wernicke's Encephalopathy, brain edema, brain neoplasms such as cerebellar neoplasms which include infratentorial neoplasms, cerebral ventricle neoplasms such as choroid plexus neoplasms, hypothalamic neoplasms, supratentorial neoplasms, canavan disease, cerebellar diseases such as cerebellar ataxia which include spinocerebellar degeneration such as ataxia telangiectasia, cerebellar dyssynergia, Friederich's Ataxia, Machado-Joseph Disease, olivopontocerebellar atrophy, cerebellar neoplasms such as infratentorial neoplasms, diffuse cerebral sclerosis such as encephalitis periaxialis, globoid cell leukodystrophy, metachromatic leukodystrophy and subacute sclerosing panencephalitis.

[2078] Additional neurologic diseases which can be treated or detected with polynucleotides, polypeptides, agonists, and/or antagonists of the present invention include cerebrovascular disorders (such as carotid artery diseases which include carotid artery thrombosis, carotid stenosis and Moyamoya Disease), cerebral amyloid angiopathy, cerebral aneurysm, cerebral anoxia, cerebral arteriosclerosis, cerebral arterioyenous malformations, cerebral artery diseases, cerebral embolism and thrombosis such as carotid artery thrombosis, sinus thrombosis and Wallenberg's Syndrome, cerebral hemorrhage such as epidural hematoma, subdural hematoma and subarachnoid hemorrhage, cerebral infarction, cerebral ischemia such as transient cerebral ischemia, Subclavian Steal Syndrome and vertebrobasilar insufficiency, vascular dementia such as multi-infarct dementia, periventricular leukomalacia, vascular headache such as cluster headache and migraine.

[2079] Additional neurologic diseases which can be treated or detected with polynucleotides, polypeptides, agonists, and/or antagonists of the present invention include dementia such as AIDS Dementia Complex, presenile dementia such as Alzheimer's Disease and Creutzfeldt-Jakob Syndrome, senile dementia such as Alzheimer's Disease and progressive supranuclear palsy, vascular dementia such as multi-infarct dementia, encephalitis which include encephalitis periaxialis, viral encephalitis such as epidemic encephalitis, Japanese Encephalitis, St. Louis Encephalitis, tick-borne encephalitis and West Nile Fever, acute disseminated encephalomyelitis, meningoencephalitis such as uveomeningoencephalitic syndrome, Postencephalitic Parkinson Disease and subacute sclerosing panencephalitis, encephalomalacia such as periventricular leukomalacia, epilepsy such as generalized epilepsy which includes infantile spasms, absence epilepsy, myoclonic epilepsy which includes MERRF Syndrome, tonic-clonic epilepsy, partial epilepsy such as complex partial epilepsy, frontal lobe epilepsy and temporal lobe epilepsy, post-traumatic epilepsy, status epilepticus such as Epilepsia Partialis Continua, and Hallervorden-Spatz Syndrome.

[2080] Additional neurologic diseases which can be treated or detected with polynucleotides, polypeptides, agonists, and/or antagonists of the present invention include hydrocephalus such as Dandy-Walker Syndrome and normal pressure hydrocephalus, hypothalamic diseases such as hypothalamic neoplasms, cerebral malaria, narcolepsy which includes cataplexy, bulbar poliomyelitis, cerebri pseudotumor, Rett Syndrome, Reye's Syndrome, thalamic diseases, cerebral toxoplasmosis, intracranial tuberculoma and Zellweger Syndrome, central nervous system infections such as AIDS Dementia Complex, Brain Abscess, subdural empyema, encephalomyelitis such as Equine Encephalomyelitis, Venezuelan Equine Encephalomyelitis, Necrotizing Hemorrhagic Encephalomyelitis, Visna, and cerebral malaria.

[2081] Additional neurologic diseases which can be treated or detected with polynucleotides, polypeptides, agonists, and/or antagonists of the present invention include meningitis such as arachnoiditis, aseptic meningtitis such as viral meningtitis which includes lymphocytic choriomeningitis, Bacterial meningtitis which includes Haemophilus Meningtitis, Listeria Meningtitis, Meningococcal Meningtitis such as Waterhouse-Friderichsen Syndrome, Pneumococcal Meningtitis and meningeal tuberculosis, fungal meningitis such as Cryptococcal Meningtitis, subdural effusion, meningoencephalitis such as uvemeningoencephalitic syndrome, myelitis such as transverse myelitis, neurosyphilis such as tabes dorsalis, poliomyelitis which includes bulbar poliomyelitis and postpoliomyelitis syndrome, prion diseases (such as Creutzfeldt-Jakob Syndrome, Bovine Spongiform Encephalopathy, Gerstmann-Straussler Syndrome, Kuru, Scrapie), and cerebral toxoplasmosis.

[2082] Additional neurologic diseases which can be treated or detected with polynucleotides, polypeptides, agonists, and/or antagonists of the present invention include central nervous system neoplasms such as brain neoplasms that include cerebellar neoplasms such as infratentorial neoplasms, cerebral ventricle neoplasms such as choroid plexus neoplasms, hypothalamic neoplasms and supratentorial neoplasms, meningeal neoplasms, spinal cord neoplasms which include epidural neoplasms, demyelinating diseases such as Canavan Diseases, diffuse cerebral sceloris which includes adrenoleukodystrophy, encephalitis periaxialis, globoid cell leukodystrophy, diffuse cerebral sclerosis such as metachromatic leukodystrophy, allergic encephalomyelitis, necrotizing hemorrhagic encephalomyelitis, progressive multifocal leukoencephalopathy, multiple sclerosis, central pontine myelinolysis, transverse myelitis, neuromyelitis optica, Scrapie, Swayback, Chronic Fatigue Syndrome, Visna, High Pressure Nervous Syndrome, Meningism, spinal cord diseases such as amyotonia congenita, amyotrophic lateral sclerosis, spinal muscular atrophy such as Werdnig-Hoffmann Disease, spinal cord compression, spinal cord neoplasms such as epidural neoplasms, syringomyelia, Tabes Dorsalis, Stiff-Man Syndrome, mental retardation such as Angelman Syndrome, Cri-du-Chat Syndrome, De Lange's Syndrome, Down Syndrome, Gangliosidoses such as gangliosidoses G(M1), Sandhoff Disease, Tay-Sachs Disease, Hartnup Disease, homocystinuria, Laurence-Moon-Biedl Syndrome, Lesch-Nyhan Syndrome, Maple Syrup Urine Disease, mucolipidosis such as fucosidosis, neuronal ceroid-lipofliscinosis, oculocerebrorenal syndrome, phenylketonuria such as maternal phenylketonuria, Prader-Willi Syndrome, Rett Syndrome, Rubinstein-Taybi Syndrome, Tuberous Sclerosis, WAGR Syndrome, nervous system abnormalities such as holoprosencephaly, neural tube defects such as anencephaly which includes hydrangencephaly, Arnold-Chairi Deformity, encephalocele, meningocele, meningomyelocele, spinal dysraphism such as spina bifida cystica and spina bifida occulta.

[2083] Additional neurologic diseases which can be treated or detected with polynucleotides, polypeptides, agonists, and/or antagonists of the present invention include hereditary motor and sensory neuropathies which include Charcot-Marie Disease, Hereditary optic atrophy, Refsum's Disease, hereditary spastic paraplegia, Werdnig-Hoffmann Disease, Hereditary Sensory and Autonomic Neuropathies such as Congenital Analgesia and Familial Dysautonomia, Neurologic manifestations (such as agnosia that include Gerstmann's Syndrome, Amnesia such as retrograde amnesia, apraxia, neurogenic bladder, cataplexy, communicative disorders such as hearing disorders that includes deafness, partial hearing loss, loudness recruitment and tinnitus, language disorders such as aphasia which include agraphia, anomia, broca aphasia, and Wernicke Aphasia, Dyslexia such as Acquired Dyslexia, language development disorders, speech disorders such as aphasia which includes anomia, broca aphasia and Wernicke Aphasia, articulation disorders, communicative disorders such as speech disorders which include dysarthria, echolalia, mutism and stuttering, voice disorders such as aphonia and hoarseness, decerebrate state, delirium, fasciculation, hallucinations, meningism, movement disorders such as angelman syndrome, ataxia, athetosis, chorea, dystonia, hypokinesia, muscle hypotonia, myoclonus, tic, torticollis and tremor, muscle hypertonia such as muscle rigidity such as stiff-man syndrome, muscle spasticity, paralysis such as facial paralysis which includes Herpes Zoster Oticus, Gastroparesis, Hemiplegia, ophthalmoplegia such as diplopia, Duane's Syndrome, Homer's Syndrome, Chronic progressive external ophthalmoplegia such as Kearns Syndrome, Bulbar Paralysis, Tropical Spastic Paraparesis, Paraplegia such as Brown-Sequard Syndrome, quadriplegia, respiratory paralysis and vocal cord paralysis, paresis, phantom limb, taste disorders such as ageusia and dysgeusia, vision disorders such as amblyopia, blindness, color vision defects, diplopia, hemianopsia, scotoma and subnormal vision, sleep disorders such as hypersomnia which includes Kleine-Levin Syndrome, insomnia, and somnambulism, spasm such as trismus, unconsciousness such as coma, persistent vegetative state and syncope and vertigo, neuromuscular diseases such as amyotonia congenita, amyotrophic lateral sclerosis, Lambert-Eaton Myasthenic Syndrome, motor neuron disease, muscular atrophy such as spinal muscular atrophy, Charcot-Marie Disease and Werdnig-Hoffmann Disease, Postpoliomyelitis Syndrome, Muscular Dystrophy, Myasthenia Gravis, Myotonia Atrophica, Myotonia Confenita, Nemaline Myopathy, Familial Periodic Paralysis, Multiplex Paramyloclonus, Tropical Spastic Paraparesis and Stiff-Man Syndrome, peripheral nervous system diseases such as acrodynia, amyloid neuropathies, autonomic nervous system diseases such as Adie's Syndrome, Barre-Lieou Syndrome, Familial Dysautonomia, Homer's Syndrome, Reflex Sympathetic Dystrophy and Shy-Drager Syndrome, Cranial Nerve Diseases such as Acoustic Nerve Diseases such as Acoustic Neuroma which includes Neurofibromatosis 2, Facial Nerve Diseases such as Facial Neuralgia, Melkersson-Rosenthal Syndrome, ocular motility disorders which includes amblyopia, nystagmus, oculomotor nerve paralysis, ophthalmoplegia such as Duane's Syndrome, Homer's Syndrome, Chronic Progressive External Ophthalmoplegia which includes Kearns Syndrome, Strabismus such as Esotropia and Exotropia, Oculomotor Nerve Paralysis, Optic Nerve Diseases such as Optic Atrophy which includes Hereditary Optic Atrophy, Optic Disk Drusen, Optic Neuritis such as Neuromyelitis Optica, Papilledema, Trigeminal Neuralgia, Vocal Cord Paralysis, Demyelinating Diseases such as Neuromyelitis Optica and Swayback, and Diabetic neuropathies such as diabetic foot.

[2084] Additional neurologic diseases which can be treated or detected with polynucleotides, polypeptides, agonists, and/or antagonists of the present invention include nerve compression syndromes such as carpal tunnel syndrome, tarsal tunnel syndrome, thoracic outlet syndrome such as cervical rib syndrome, ulnar nerve compression syndrome, neuralgia such as causalgia, cervico-brachial neuralgia, facial neuralgia and trigeminal neuralgia, neuritis such as experimental allergic neuritis, optic neuritis, polyneuritis, polyradiculoneuritis and radiculities such as polyradiculitis, hereditary motor and sensory neuropathies such as Charcot-Marie Disease, Hereditary Optic Atrophy, Refsum's Disease, Hereditary Spastic Paraplegia and Werdnig-Hoffmann Disease, Hereditary Sensory and Autonomic Neuropathies which include Congenital Analgesia and Familial Dysautonomia, POEMS Syndrome, Sciatica, Gustatory Sweating and Tetany).

[2085] Endocrine Disorders

[2086] Polynucleotides or polypeptides, or agonists or antagonists of the present invention, may be used to treat, prevent, diagnose, and/or prognose disorders and/or diseases related to hormone imbalance, and/or disorders or diseases of the endocrine system.

[2087] Hormones secreted by the glands of the endocrine system control physical growth, sexual function, metabolism, and other functions. Disorders may be classified in two ways: disturbances in the production of hormones, and the inability of tissues to respond to hormones. The etiology of these hormone imbalance or endocrine system diseases, disorders or conditions may be genetic, somatic, such as cancer and some autoimmune diseases, acquired (e.g., by chemotherapy, injury or toxins), or infectious. Moreover, polynucleotides, polypeptides, antibodies, and/or agonists or antagonists of the present invention can be used as a marker or detector of a particular disease or disorder related to the endocrine system and/or hormone imbalance.

[2088] Endocrine system and/or hormone imbalance and/or diseases encompass disorders of uterine motility including, but not limited to: complications with pregnancy and labor (e.g., pre-term labor, post-term pregnancy, spontaneous abortion, and slow or stopped labor); and disorders and/or diseases of the menstrual cycle (e.g., dysmenorrhea and endometriosis).

[2089] Endocrine system and/or hormone imbalance disorders and/or diseases include disorders and/or diseases of the pancreas, such as, for example, diabetes mellitus, diabetes insipidus, congenital pancreatic agenesis, pheochromocytoma—islet cell tumor syndrome; disorders and/or diseases of the adrenal glands such as, for example, Addison's Disease, corticosteroid deficiency, virilizing disease, hirsutism, Cushing's Syndrome, hyperaldosteronism, pheochromocytoma; disorders and/or diseases of the pituitary gland, such as, for example, hyperpituitarism, hypopituitarism, pituitary dwarfism, pituitary adenoma, panhypopituitarism, acromegaly, gigantism; disorders and/or diseases of the thyroid, including but not limited to, hyperthyroidism, hypothyroidism, Plummer's disease, Graves' disease (toxic diffuse goiter), toxic nodular goiter, thyroiditis (Hashimoto's thyroiditis, subacute granulomatous thyroiditis, and silent lymphocytic thyroiditis), Pendred's syndrome, myxedema, cretinism, thyrotoxicosis, thyroid hormone coupling defect, thymic aplasia, Hurthle cell tumours of the thyroid, thyroid cancer, thyroid carcinoma, Medullary thyroid carcinoma; disorders and/or diseases of the parathyroid, such as, for example, hyperparathyroidism, hypoparathyroidism; disorders and/or diseases of the hypothalamus.

[2090] In specific embodiments, the polynucleotides and/or polypeptides corresponding to this gene and/or agonists or antagonists of those polypeptides (including antibodies) as well as fragments and variants of those polynucleotides, polypeptides, agonists and antagonists, may be used to diagnose, prognose, treat, prevent, or ameliorate diseases and disorders associated with aberrant glucose metabolism or glucose uptake into cells.

[2091] In a specific embodiment, the polynucleotides and/or polypeptides corresponding to this gene and/or agonists and/or antagonists thereof may be used to diagnose, prognose, treat, prevent, and/or ameliorate type I diabetes mellitus (insulin dependent diabetes mellitus, IDDM).

[2092] In another embodiment, the polynucleotides and/or polypeptides corresponding to this gene and/or agonists and/or antagonists thereof may be used to diagnose, prognose, treat, prevent, and/or ameliorate type II diabetes mellitus (insulin resistant diabetes mellitus).

[2093] Additionally, in other embodiments, the polynucleotides and/or polypeptides corresponding to this gene and/or antagonists thereof (especially neutralizing or antagonistic antibodies) may be used to diagnose, prognose, treat, prevent, and/or ameliorate conditions associated with (type I or type II) diabetes mellitus, including, but not limited to, diabetic ketoacidosis, diabetic coma, nonketotic hyperglycemic-hyperosmolar coma, seizures, mental confusion, drowsiness, cardiovascular disease (e.g., heart disease, atherosclerosis, microvascular disease, hypertension, stroke, and other diseases and disorders as described in the “Cardiovascular Disorders” section), dyslipidemia, kidney disease (e.g., renal failure, nephropathy other diseases and disorders as described in the “Renal Disorders” section), nerve damage, neuropathy, vision impairment (e.g., diabetic retinopathy and blindness), ulcers and impaired wound healing, infections (e.g., infectious diseases and disorders as described in the “Infectious Diseases” section, especially of the urinary tract and skin), carpal tunnel syndrome and Dupuytren's contracture.

[2094] In other embodiments, the polynucleotides and/or polypeptides corresponding to this gene and/or agonists or antagonists thereof are administered to an animal, preferably a mammal, and most preferably a human, in order to regulate the animal's weight. In specific embodiments the polynucleotides and/or polypeptides corresponding to this gene and/or agonists or antagonists thereof are administered to an animal, preferably a mammal, and most preferably a human, in order to control the animal's weight by modulating a biochemical pathway involving insulin. In still other embodiments the polynucleotides and/or polypeptides corresponding to this gene and/or agonists or antagonists thereof are administered to an animal, preferably a mammal, and most preferably a human, in order to control the animal's weight by modulating a biochemical pathway involving insulin-like growth factor.

[2095] In addition, endocrine system and/or hormone imbalance disorders and/or diseases may also include disorders and/or diseases of the testes or ovaries, including cancer. Other disorders and/or diseases of the testes or ovaries further include, for example, ovarian cancer, polycystic ovary syndrome, Klinefelter's syndrome, vanishing testes syndrome (bilateral anorchia), congenital absence of Leydig's cells, cryptorchidism, Noonan's syndrome, myotonic dystrophy, capillary haemangioma of the testis (benign), neoplasias of the testis and neo-testis.

[2096] Moreover, endocrine system and/or hormone imbalance disorders and/or diseases may also include disorders and/or diseases such as, for example, polyglandular deficiency syndromes, pheochromocytoma, neuroblastoma, multiple Endocrine neoplasia, and disorders and/or cancers of endocrine tissues.

[2097] In another embodiment, a polypeptide of the invention, or polynucleotides, antibodies, agonists, or antagonists corresponding to that polypeptide, may be used to diagnose, prognose, prevent, and/or treat endocrine diseases and/or disorders associated with the tissue(s) in which the polypeptide of the invention is expressed, including one, two, three, four, five, or more tissues disclosed in the “FEATURES OF PROTEIN” section for each gene.

[2098] Reproductive System Disorders

[2099] The polynucleotides or polypeptides, or agonists or antagonists of the invention may be used for the diagnosis, treatment, or prevention of diseases and/or disorders of the reproductive system. Reproductive system disorders that can be treated by the compositions of the invention, include, but are not limited to, reproductive system injuries, infections, neoplastic disorders, congenital defects, and diseases or disorders which result in infertility, complications with pregnancy, labor, or parturition, and postpartum difficulties.

[2100] Reproductive system disorders and/or diseases include diseases and/or disorders of the testes, including testicular atrophy, testicular feminization, cryptorchism (unilateral and bilateral), anorchia, ectopic testis, epididymitis and orchitis (typically resulting from infections such as, for example, gonorrhea, mumps, tuberculosis, and syphilis), testicular torsion, vasitis nodosa, germ cell tumors (e.g., seminomas, embryonal cell carcinomas, teratocarcinomas, choriocarcinomas, yolk sac tumors, and teratomas), stromal tumors (e.g., Leydig cell tumors), hydrocele, hematocele, varicocele, spermatocele, inguinal hernia, and disorders of sperm production (e.g., immotile cilia syndrome, aspermia, asthenozoospermia, azoospermia, oligospermia, and teratozoospermia).

[2101] Reproductive system disorders also include disorders of the prostate gland, such as acute non-bacterial prostatitis, chronic non-bacterial prostatitis, acute bacterial prostatitis, chronic bacterial prostatitis, prostatodystonia, prostatosis, granulomatous prostatitis, malacoplakia, benign prostatic hypertrophy or hyperplasia, and prostate neoplastic disorders, including adenocarcinomas, transitional cell carcinomas, ductal carcinomas, and squamous cell carcinomas.

[2102] Additionally, the compositions of the invention may be useful in the diagnosis, treatment, and/or prevention of disorders or diseases of the penis and urethra, including inflammatory disorders, such as balanoposthitis, balanitis xerotica obliterans, phimosis, paraphimosis, syphilis, herpes simplex virus, gonorrhea, non-gonococcal urethritis, chlamydia, mycoplasma, trichomonas, HIV, AIDS, Reiter's syndrome, condyloma acuminatum, condyloma latum, and pearly penile papules; urethral abnormalities, such as hypospadias, epispadias, and phimosis; premalignant lesions, including Erythroplasia of Queyrat, Bowen's disease, Bowenoid paplosis, giant condyloma of Buscke-Lowenstein, and varrucous carcinoma; penile cancers, including squamous cell carcinomas, carcinoma in situ, verrucous carcinoma, and disseminated penile carcinoma; urethral neoplastic disorders, including penile urethral carcinoma, bulbomembranous urethral carcinoma, and prostatic urethral carcinoma; and erectile disorders, such as priapism, Peyronie's disease, erectile dysfunction, and impotence.

[2103] Moreover, diseases and/or disorders of the vas deferens include vasculititis and CBAVD (congenital bilateral absence of the vas deferens); additionally, the polynucleotides, polypeptides, and agonists or antagonists of the present invention may be used in the diagnosis, treatment, and/or prevention of diseases and/or disorders of the seminal vesicles, including hydatid disease, congenital chloride diarrhea, and polycystic kidney disease.

[2104] Other disorders and/or diseases of the male reproductive system include, for example, Klinefelter's syndrome, Young's syndrome, premature ejaculation, diabetes mellitus, cystic fibrosis, Kartagener's syndrome, high fever, multiple sclerosis, and gynecomastia.

[2105] Further, the polynucleotides, polypeptides, and agonists or antagonists of the present invention may be used in the diagnosis, treatment, and/or prevention of diseases and/or disorders of the vagina and vulva, including bacterial vaginosis, candida vaginitis, herpes simplex virus, chancroid, granuloma inguinale, lymphogranuloma venereum, scabies, human papillomavirus, vaginal trauma, vulvar trauma, adenosis, chlamydia vaginitis, gonorrhea, trichomonas vaginitis, condyloma acuminatum, syphilis, molluscum contagiosum, atrophic vaginitis, Paget's disease, lichen sclerosus, lichen planus, vulvodynia, toxic shock syndrome, vaginismus, vulvovaginitis, vulvar vestibulitis, and neoplastic disorders, such as squamous cell hyperplasia, clear cell carcinoma, basal cell carcinoma, melanomas, cancer of Bartholin's gland, and vulvar intraepithelial neoplasia.

[2106] Disorders and/or diseases of the uterus include dysmenorrhea, retroverted uterus, endometriosis, fibroids, adenomyosis, anovulatory bleeding, amenorrhea, Cushing's syndrome, hydatidiform moles, Asherman's syndrome, premature menopause, precocious puberty, uterine polyps, dysfunctional uterine bleeding (e.g., due to aberrant hormonal signals), and neoplastic disorders, such as adenocarcinomas, keiomyosarcomas, and sarcomas. Additionally, the polypeptides, polynucleotides, or agonists or antagonists of the invention may be useful as a marker or detector of, as well as in the diagnosis, treatment, and/or prevention of congenital uterine abnormalities, such as bicornuate uterus, septate uterus, simple unicornuate uterus, unicornuate uterus with a noncavitary rudimentary horn, unicornuate uterus with a non-communicating cavitary rudimentary horn, unicornuate uterus with a communicating cavitary horn, arcuate uterus, uterine didelfus, and T-shaped uterus.

[2107] Ovarian diseases and/or disorders include anovulation, polycystic ovary syndrome (Stein-Leventhal syndrome), ovarian cysts, ovarian hypofunction, ovarian insensitivity to gonadotropins, ovarian overproduction of androgens, right ovarian vein syndrome, amenorrhea, hirutism, and ovarian cancer (including, but not limited to, primary and secondary cancerous growth, Sertoli-Leydig tumors, endometriod carcinoma of the ovary, ovarian papillary serous adenocarcinoma, ovarian mucinous adenocarcinoma, and Ovarian Krukenberg tumors).

[2108] Cervical diseases and/or disorders include cervicitis, chronic cervicitis, mucopurulent cervicitis, cervical dysplasia, cervical polyps, Nabothian cysts, cervical erosion, cervical incompetence, and cervical neoplasms (including, for example, cervical carcinoma, squamous metaplasia, squamous cell carcinoma, adenosquamous cell neoplasia, and columnar cell neoplasia).

[2109] Additionally, diseases and/or disorders of the reproductive system include disorders and/or diseases of pregnancy, including miscarriage and stillbirth, such as early abortion, late abortion, spontaneous abortion, induced abortion, therapeutic abortion, threatened abortion, missed abortion, incomplete abortion, complete abortion, habitual abortion, missed abortion, and septic abortion; ectopic pregnancy, anemia, Rh incompatibility, vaginal bleeding during pregnancy, gestational diabetes, intrauterine growth retardation, polyhydramnios, HELLP syndrome, abruptio placentae, placenta previa, hyperemesis, preeclampsia, eclampsia, herpes gestationis, and urticaria of pregnancy. Additionally, the polynucleotides, polypeptides, and agonists or antagonists of the present invention may be used in the diagnosis, treatment, and/or prevention of diseases that can complicate pregnancy, including heart disease, heart failure, rheumatic heart disease, congenital heart disease, mitral valve prolapse, high blood pressure, anemia, kidney disease, infectious disease (e.g., rubella, cytomegalovirus, toxoplasmosis, infectious hepatitis, chlamydia, HIV, AIDS, and genital herpes), diabetes mellitus, Graves' disease, thyroiditis, hypothyroidism, Hashimoto's thyroiditis, chronic active hepatitis, cirrhosis of the liver, primary biliary cirrhosis, asthma, systemic lupus eryematosis, rheumatoid arthritis, myasthenia gravis, idiopathic thrombocytopenic purpura, appendicitis, ovarian cysts, gallbladder disorders, and obstruction of the intestine.

[2110] Complications associated with labor and parturition include premature rupture of the membranes, pre-term labor, post-term pregnancy, postmaturity, labor that progresses too slowly, fetal distress (e.g., abnormal heart rate (fetal or maternal), breathing problems, and abnormal fetal position), shoulder dystocia, prolapsed umbilical cord, amniotic fluid embolism, and aberrant uterine bleeding.

[2111] Further, diseases and/or disorders of the postdelivery period, including endometritis, myometritis, parametritis, peritonitis, pelvic thrombophlebitis, pulmonary embolism, endotoxemia, pyelonephritis, saphenous thrombophlebitis, mastitis, cystitis, postpartum hemorrhage, and inverted uterus.

[2112] Other disorders and/or diseases of the female reproductive system that may be diagnosed, treated, and/or prevented by the polynucleotides, polypeptides, and agonists or antagonists of the present invention include, for example, Turner's syndrome, pseudohermaphroditism, premenstrual syndrome, pelvic inflammatory disease, pelvic congestion (vascular engorgement), frigidity, anorgasmia, dyspareunia, ruptured fallopian tube, and Mittelschmerz.

[2113] Infectious Disease

[2114] Polynucleotides or polypeptides, as well as agonists or antagonists of the present invention can be used to treat or detect infectious agents. For example, by increasing the immune response, particularly increasing the proliferation and differentiation of B and/or T cells, infectious diseases may be treated. The immune response may be increased by either enhancing an existing immune response, or by initiating a new immune response. Alternatively, polynucleotides or polypeptides, as well as agonists or antagonists of the present invention may also directly inhibit the infectious agent, without necessarily eliciting an immune response.

[2115] Viruses are one example of an infectious agent that can cause disease or symptoms that can be treated or detected by a polynucleotide or polypeptide and/or agonist or antagonist of the present invention. Examples of viruses, include, but are not limited to Examples of viruses, include, but are not limited to the following DNA and RNA viruses and viral families: Arbovirus, Adenoviridae, Arenaviridae, Arterivirus, Birnaviridae, Bunyaviridae, Caliciviridae, Circoviridae, Coronaviridae, Dengue, EBV, HIV, Flaviviridae, Hepadnaviridae (Hepatitis), Herpesviridae (such as, Cytomegalovirus, Herpes Simplex, Herpes Zoster), Mononegavirus (e.g., Paramyxoviridae, Morbillivirus, Rhabdoviridae), Orthomyxoviridae (e.g., Influenza A, Influenza B, and parainfluenza), Papiloma virus, Papovaviridae, Parvoviridae, Picornaviridae, Poxyiridae (such as Smallpox or Vaccinia), Reoviridae (e.g., Rotavirus), Retroviridae (HTLV-I, HTLV-II, Lentivirus), and Togaviridae (e.g., Rubivirus). Viruses falling within these families can cause a variety of diseases or symptoms, including, but not limited to: arthritis, bronchiollitis, respiratory syncytial virus, encephalitis, eye infections (e.g., conjunctivitis, keratitis), chronic fatigue syndrome, hepatitis (A, B, C, E, Chronic Active, Delta), Japanese B encephalitis, Junin, Chikungunya, Rift Valley fever, yellow fever, meningitis, opportunistic infections (e.g., AIDS), pneumonia, Burkitt's Lymphoma, chickenpox, hemorrhagic fever, Measles, Mumps, Parainfluenza, Rabies, the common cold, Polio, leukemia, Rubella, sexually transmitted diseases, skin diseases (e.g., Kaposi's, warts), and viremia. polynucleotides or polypeptides, or agonists or antagonists of the invention, can be used to treat or detect any of these symptoms or diseases. In specific embodiments, polynucleotides, polypeptides, or agonists or antagonists of the invention are used to treat: meningitis, Dengue, EBV, and/or hepatitis (e.g., hepatitis B). In an additional specific embodiment polynucleotides, polypeptides, or agonists or antagonists of the invention are used to treat patients nonresponsive to one or more other commercially available hepatitis vaccines. In a further specific embodiment polynucleotides, polypeptides, or agonists or antagonists of the invention are used to treat AIDS.

[2116] Similarly, bacterial and fungal agents that can cause disease or symptoms and that can be treated or detected by a polynucleotide or polypeptide and/or agonist or antagonist of the present invention include, but not limited to, the following Gram-Negative and Gram-positive bacteria, bacterial families, and fungi: Actinomyces (e.g., Norcardia), Acinetobacter, Cryptococcus neoformans, Aspergillus, Bacillaceae (e.g., Bacillus anthrasis), Bacteroides (e.g., Bacteroides fragilis), Blastomycosis, Bordetella, Borrelia (e.g., Borrelia burgdorferi), Brucella, Candidia, Campylobacter, Chlamydia, Clostridium (e.g., Clostridium botulinum, Clostridium dificile, Clostridium perfringens, Clostridium tetani), Coccidioides, Corynebacterium (e.g., Corynebacterium diptheriae), Cryptococcus, Dermatocycoses, E. coli (e.g., Enterotoxigenic E. coli and Enterohemorrhagic E. coli), Enterobacter (e.g. Enterobacter aerogenes), Enterobacteriaceae (Klebsiella, Salmonella (e.g., Salmonella typhi, Salmonella enteritidis, Salmonella typhi), Serratia, Yersinia, Shigella), Erysipelothrix, Haemophilus (e.g., Haemophilus influenza type B), Helicobacter, Legionella (e.g., Legionella pneumophila), Leptospira, Listeria (e.g., Listeria monocytogenes), Mycoplasma, Mycobacterium (e.g., Mycobacterium leprae and Mycobacterium tuberculosis), Vibrio (e.g., Vibrio cholerae), Neisseriaceae (e.g., Neisseria gonorrhea, Neisseria meningitidis), Pasteurellacea, Proteus, Pseudomonas (e.g., Pseudomonas aeruginosa), Rickettsiaceae, Spirochetes (e.g., Treponema spp., Leptospira spp., Borrelia spp.), Shigella spp., Staphylococcus (e.g., Staphylococcus aureus), Meningiococcus, Pneumococcus and Streptococcus (e.g., Streptococcus pneumoniae and Groups A, B, and C Streptococci), and Ureaplasmas. These bacterial, parasitic, and fungal families can cause diseases or symptoms, including, but not limited to: antibiotic-resistant infections, bacteremia, endocarditis, septicemia, eye infections (e.g., conjunctivitis), uveitis, tuberculosis, gingivitis, bacterial diarrhea, opportunistic infections (e.g., AIDS related infections), paronychia, prosthesis-related infections, dental caries, Reiter's Disease, respiratory tract infections, such as Whooping Cough or Empyema, sepsis, Lyme Disease, Cat-Scratch Disease, dysentery, paratyphoid fever, food poisoning, Legionella disease, chronic and acute inflammation, erythema, yeast infections, typhoid, pneumonia, gonorrhea, meningitis (e.g., mengitis types A and B), chlamydia, syphillis, diphtheria, leprosy, brucellosis, peptic ulcers, anthrax, spontaneous abortions, birth defects, pneumonia, lung infections, ear infections, deafness, blindness, lethargy, malaise, vomiting, chronic diarrhea, Crohn's disease, colitis, vaginosis, sterility, pelvic inflammatory diseases, candidiasis, paratuberculosis, tuberculosis, lupus, botulism, gangrene, tetanus, impetigo, Rheumatic Fever, Scarlet Fever, sexually transmitted diseases, skin diseases (e.g., cellulitis, dermatocycoses), toxemia, urinary tract infections, wound infections, noscomial infections. Polynucleotides or polypeptides, agonists or antagonists of the invention, can be used to treat or detect any of these symptoms or diseases. In specific embodiments, polynucleotides, polypeptides, agonists or antagonists of the invention are used to treat: tetanus, diptheria, botulism, and/or meningitis type B.

[2117] Moreover, parasitic agents causing disease or symptoms that can be treated, prevented, and/or diagnosed by a polynucleotide or polypeptide and/or agonist or antagonist of the present invention include, but not limited to, the following families or class: Amebiasis, Babesiosis, Coccidiosis, Cryptosporidiosis, Dientamoebiasis, Dourine, Ectoparasitic, Giardias, Helminthiasis, Leishmaniasis, Schistisoma, Theileriasis, Toxoplasmosis, Trypanosomiasis, and Trichomonas and Sporozoans (e.g., Plasmodium virax, Plasmodium falciparium, Plasmodium malariae and Plasmodium ovale). These parasites can cause a variety of diseases or symptoms, including, but not limited to: Scabies, Trombiculiasis, eye infections, intestinal disease (e.g., dysentery, giardiasis), liver disease, lung disease, opportunistic infections (e.g., AIDS related), malaria, pregnancy complications, and toxoplasmosis. polynucleotides or polypeptides, or agonists or antagonists of the invention, can be used to treat, prevent, and/or diagnose any of these symptoms or diseases. In specific embodiments, polynucleotides, polypeptides, or agonists or antagonists of the invention are used to treat, prevent, and/or diagnose malaria.

[2118] Polynucleotides or polypeptides, as well as agonists or antagonists of the present invention of the present invention could either be by administering an effective amount of a polypeptide to the patient, or by removing cells from the patient, supplying the cells with a polynucleotide of the present invention, and returning the engineered cells to the patient (ex vivo therapy). Moreover, the polypeptide or polynucleotide of the present invention can be used as an antigen in a vaccine to raise an immune response against infectious disease.

[2119] Regeneration

[2120] Polynucleotides or polypeptides, as well as agonists or antagonists of the present invention can be used to differentiate, proliferate, and attract cells, leading to the regeneration of tissues. (See, Science 276:59-87 (1997)). The regeneration of tissues could be used to repair, replace, or protect tissue damaged by congenital defects, trauma (wounds, burns, incisions, or ulcers), age, disease (e.g. osteoporosis, osteocarthritis, periodontal disease, liver failure), surgery, including cosmetic plastic surgery, fibrosis, reperfusion injury, or systemic cytokine damage.

[2121] Tissues that could be regenerated using the present invention include organs (e.g., pancreas, liver, intestine, kidney, skin, endothelium), muscle (smooth, skeletal or cardiac), vasculature (including vascular and lymphatics), nervous, hematopoietic, and skeletal (bone, cartilage, tendon, and ligament) tissue. Preferably, regeneration occurs without or decreased scarring. Regeneration also may include angiogenesis.

[2122] Moreover, polynucleotides or polypeptides, as well as agonists or antagonists of the present invention, may increase regeneration of tissues difficult to heal. For example, increased tendon/ligament regeneration would quicken recovery time after damage. Polynucleotides or polypeptides, as well as agonists or antagonists of the present invention could also be used prophylactically in an effort to avoid damage. Specific diseases that could be treated include of tendinitis, carpal tunnel syndrome, and other tendon or ligament defects. A further example of tissue regeneration of non-healing wounds includes pressure ulcers, ulcers associated with vascular insufficiency, surgical, and traumatic wounds.

[2123] Similarly, nerve and brain tissue could also be regenerated by using polynucleotides or polypeptides, as well as agonists or antagonists of the present invention, to proliferate and differentiate nerve cells. Diseases that could be treated using this method include central and peripheral nervous system diseases, neuropathies, or mechanical and traumatic disorders (e.g., spinal cord disorders, head trauma, cerebrovascular disease, and stoke). Specifically, diseases associated with peripheral nerve injuries, peripheral neuropathy (e.g., resulting from chemotherapy or other medical therapies), localized neuropathies, and central nervous system diseases (e.g., Alzheimer's disease, Parkinson's disease, Huntington's disease, amyotrophic lateral sclerosis, and Shy-Drager syndrome), could all be treated using the polynucleotides or polypeptides, as well as agonists or antagonists of the present invention.

[2124] Gastrointestinal Disorders

[2125] Polynucleotides or polypeptides, or agonists or antagonists of the present invention, may be used to treat, prevent, diagnose, and/or prognose gastrointestinal disorders, including inflammatory diseases and/or conditions, infections, cancers (e.g., intestinal neoplasms (carcinoid tumor of the small intestine, non-Hodgkin's lymphoma of the small intestine, small bowl lymphoma)), and ulcers, such as peptic ulcers.

[2126] Gastrointestinal disorders include dysphagia, odynophagia, inflammation of the esophagus, peptic esophagitis, gastric reflux, submucosal fibrosis and stricturing, Mallory-Weiss lesions, leiomyomas, lipomas, epidermal cancers, adeoncarcinomas, gastric retention disorders, gastroenteritis, gastric atrophy, gastric/stomach cancers, polyps of the stomach, autoimmune disorders such as pernicious anemia, pyloric stenosis, gastritis (bacterial, viral, eosinophilic, stress-induced, chronic erosive, atrophic, plasma cell, and Ménétrier's), and peritoneal diseases (e.g., chyloperioneum, hemoperitoneum, mesenteric cyst, mesenteric lymphadenitis, mesenteric vascular occlusion, panniculitis, neoplasms, peritonitis, pneumoperitoneum, bubphrenic abscess,).

[2127] Gastrointestinal disorders also include disorders associated with the small intestine, such as malabsorption syndromes, distension, irritable bowel syndrome, sugar intolerance, celiac disease, duodenal ulcers, duodenitis, tropical sprue, Whipple's disease, intestinal lymphangiectasia, Crohn's disease, appendicitis, obstructions of the ileum, Meckel's diverticulum, multiple diverticula, failure of complete rotation of the small and large intestine, lymphoma, and bacterial and parasitic diseases (such as Traveler's diarrhea, typhoid and paratyphoid, cholera, infection by Roundworms (Ascariasis lumbricoides), Hookworms (Ancylostoma duodenale), Threadworms (Enterobius vermicularis), Tapeworms (Taenia saginata, Echinococcus granulosus, Diphyllobothrium spp., and T. solium).

[2128] Liver diseases and/or disorders include intrahepatic cholestasis (alagille syndrome, biliary liver cirrhosis), fatty liver (alcoholic fatty liver, reye syndrome), hepatic vein thrombosis, hepatolentricular degeneration, hepatomegaly, hepatopulmonary syndrome, hepatorenal syndrome, portal hypertension (esophageal and gastric varices), liver abscess (amebic liver abscess), liver cirrhosis (alcoholic, biliary and experimental), alcoholic liver diseases (fatty liver, hepatitis, cirrhosis), parasitic (hepatic echinococcosis, fascioliasis, amebic liver abscess), jaundice (hemolytic, hepatocellular, and cholestatic), cholestasis, portal hypertension, liver enlargement, ascites, hepatitis (alcoholic hepatitis, animal hepatitis, chronic hepatitis (autoimmune, hepatitis B, hepatitis C, hepatitis D, drug induced), toxic hepatitis, viral human hepatitis (hepatitis A, hepatitis B, hepatitis C, hepatitis D, hepatitis E), Wilson's disease, granulomatous hepatitis, secondary biliary cirrhosis, hepatic encephalopathy, portal hypertension, varices, hepatic encephalopathy, primary biliary cirrhosis, primary sclerosing cholangitis, hepatocellular adenoma, hemangiomas, bile stones, liver failure (hepatic encephalopathy, acute liver failure), and liver neoplasms (angiomyolipoma, calcified liver metastases, cystic liver metastases, epithelial tumors, fibrolamellar hepatocarcinoma, focal nodular hyperplasia, hepatic adenoma, hepatobiliary cystadenoma, hepatoblastoma, hepatocellular carcinoma, hepatoma, liver cancer, liver hemangioendothelioma, mesenchymal hamartoma, mesenchymal tumors of liver, nodular regenerative hyperplasia, benign liver tumors (Hepatic cysts [Simple cysts, Polycystic liver disease, Hepatobiliary cystadenoma, Choledochal cyst], Mesenchymal tumors [Mesenchymal hamartoma, Infantile hemangioendothelioma, Hemangioma, Peliosis hepatis, Lipomas, Inflammatory pseudotumor, Miscellaneous], Epithelial tumors [Bile duct epithelium (Bile duct hamartoma, Bile duct adenoma), Hepatocyte (Adenoma, Focal nodular hyperplasia, Nodular regenerative hyperplasia)], malignant liver tumors [hepatocellular, hepatoblastoma, hepatocellular carcinoma, cholangiocellular, cholangiocarcinoma, cystadenocarcinoma, tumors of blood vessels, angiosarcoma, Karposi's sarcoma, hemangioendothelioma, other tumors, embryonal sarcoma, fibrosarcoma, leiomyosarcoma, rhabdomyosarcoma, carcinosarcoma, teratoma, carcinoid, squamous carcinoma, primary lymphoma]), peliosis hepatis, erythrohepatic porphyria, hepatic porphyria (acute intermittent porphyria, porphyria cutanea tarda), Zellweger syndrome).

[2129] Pancreatic diseases and/or disorders include acute pancreatitis, chronic pancreatitis (acute necrotizing pancreatitis, alcoholic pancreatitis), neoplasms (adenocarcinoma of the pancreas, cystadenocarcinoma, insulinoma, gastrinoma, and glucagonoma, cystic neoplasms, islet-cell tumors, pancreoblastoma), and other pancreatic diseases (e.g., cystic fibrosis, cyst (pancreatic pseudocyst, pancreatic fistula, insufficiency)).

[2130] Gallbladder diseases include gallstones (cholelithiasis and choledocholithiasis), postcholecystectomy syndrome, diverticulosis of the gallbladder, acute cholecystitis, chronic cholecystitis, bile duct tumors, and mucocele.

[2131] Diseases and/or disorders of the large intestine include antibiotic-associated colitis, diverticulitis, ulcerative colitis, acquired megacolon, abscesses, fungal and bacterial infections, anorectal disorders (e.g., fissures, hemorrhoids), colonic diseases (colitis, colonic neoplasms [colon cancer, adenomatous colon polyps (e.g., villous adenoma), colon carcinoma, colorectal cancer], colonic diverticulitis, colonic diverticulosis, megacolon [Hirschsprung disease, toxic megacolon]; sigmoid diseases [proctocolitis, sigmoin neoplasms]), constipation, Crohn's disease, diarrhea (infantile diarrhea, dysentery), duodenal diseases (duodenal neoplasms, duodenal obstruction, duodenal ulcer, duodenitis), enteritis (enterocolitis), HIV enteropathy, ileal diseases (ileal neoplasms, ileitis), immunoproliferative small intestinal disease, inflammatory bowel disease (ulcerative colitis, Crohn's disease), intestinal atresia, parasitic diseases (anisakiasis, balantidiasis, blastocystis infections, cryptosporidiosis, dientamoebiasis, amebic dysentery, giardiasis), intestinal fistula (rectal fistula), intestinal neoplasms (cecal neoplasms, colonic neoplasms, duodenal neoplasms, ileal neoplasms, intestinal polyps, jejunal neoplasms, rectal neoplasms), intestinal obstruction (afferent loop syndrome, duodenal obstruction, impacted feces, intestinal pseudo-obstruction [cecal volvulus], intussusception), intestinal perforation, intestinal polyps (colonic polyps, gardner syndrome, peutz-jeghers syndrome), jejunal diseases (jejunal neoplasms), malabsorption syndromes (blind loop syndrome, celiac disease, lactose intolerance, short bowl syndrome, tropical sprue, whipple's disease), mesenteric vascular occlusion, pneumatosis cystoides intestinalis, protein-losing enteropathies (intestinal lymphagiectasis), rectal diseases (anus diseases, fecal incontinence, hemorrhoids, proctitis, rectal fistula, rectal prolapse, rectocele), peptic ulcer (duodenal ulcer, peptic esophagitis, hemorrhage, perforation, stomach ulcer, Zollinger-Ellison syndrome), postgastrectomy syndromes (dumping syndrome), stomach diseases (e.g., achlorhydria, duodenogastric reflux (bile reflux), gastric antral vascular ectasia, gastric fistula, gastric outlet obstruction, gastritis (atrophic or hypertrophic), gastroparesis, stomach dilatation, stomach diverticulum, stomach neoplasms (gastric cancer, gastric polyps, gastric adenocarcinoma, hyperplastic gastric polyp), stomach rupture, stomach ulcer, stomach volvulus), tuberculosis, visceroptosis, vomiting (e.g., hematemesis, hyperemesis gravidarum, postoperative nausea and vomiting) and hemorrhagic colitis.

[2132] Further diseases and/or disorders of the gastrointestinal system include biliary tract diseases, such as, gastroschisis, fistula (e.g., biliary fistula, esophageal fistula, gastric fistula, intestinal fistula, pancreatic fistula), neoplasms (e.g., biliary tract neoplasms, esophageal neoplasms, such as adenocarcinoma of the esophagus, esophageal squamous cell carcinoma, gastrointestinal neoplasms, pancreatic neoplasms, such as adenocarcinoma of the pancreas, mucinous cystic neoplasm of the pancreas, pancreatic cystic neoplasms, pancreatoblastoma, and peritoneal neoplasms), esophageal disease (e.g., bullous diseases, candidiasis, glycogenic acanthosis, ulceration, barrett esophagus varices, atresia, cyst, diverticulum (e.g., Zenker's diverticulum), fistula (e.g., tracheoesophageal fistula), motility disorders (e.g., CREST syndrome, deglutition disorders, achalasia, spasm, gastroesophageal reflux), neoplasms, perforation (e.g., Boerhaave syndrome, Mallory-Weiss syndrome), stenosis, esophagitis, diaphragmatic hernia (e.g., hiatal hernia); gastrointestinal diseases, such as, gastroenteritis (e.g., cholera morbus, norwalk virus infection), hemorrhage (e.g., hematemesis, melena, peptic ulcer hemorrhage), stomach neoplasms (gastric cancer, gastric polyps, gastric adenocarcinoma, stomach cancer)), hernia (e.g., congenital diaphragmatic hernia, femoral hernia, inguinal hernia, obturator hernia, umbilical hernia, ventral hernia), and intestinal diseases (e.g., cecal diseases (appendicitis, cecal neoplasms)).

[2133] Chemotaxis

[2134] Polynucleotides or polypeptides, as well as agonists or antagonists of the present invention may have chemotaxis activity. A chemotaxic molecule attracts or mobilizes cells (e.g., monocytes, fibroblasts, neutrophils, T-cells, mast cells, eosinophils, epithelial and/or endothelial cells) to a particular site in the body, such as inflammation, infection, or site of hyperproliferation. The mobilized cells can then fight off and/or heal the particular trauma or abnormality.

[2135] Polynucleotides or polypeptides, as well as agonists or antagonists of the present invention may increase chemotaxic activity of particular cells. These chemotactic molecules can then be used to treat inflammation, infection, hyperproliferative disorders, or any immune system disorder by increasing the number of cells targeted to a particular location in the body. For example, chemotaxic molecules can be used to treat wounds and other trauma to tissues by attracting immune cells to the injured location. Chemotactic molecules of the present invention can also attract fibroblasts, which can be used to treat wounds.

[2136] It is also contemplated that polynucleotides or polypeptides, as well as agonists or antagonists of the present invention may inhibit chemotactic activity. These molecules could also be used to treat disorders. Thus, polynucleotides or polypeptides, as well as agonists or antagonists of the present invention could be used as an inhibitor of chemotaxis.

[2137] Binding Activity

[2138] A polypeptide of the present invention may be used to screen for molecules that bind to the polypeptide or for molecules to which the polypeptide binds. The binding of the polypeptide and the molecule may activate (agonist), increase, inhibit (antagonist), or decrease activity of the polypeptide or the molecule bound. Examples of such molecules include antibodies, oligonucleotides, proteins (e.g., receptors), or small molecules.

[2139] Preferably, the molecule is closely related to the natural ligand of the polypeptide, e.g., a fragment of the ligand, or a natural substrate, a ligand, a structural or functional mimetic. (See, Coligan et al., Current Protocols in Immunology 1(2):Chapter 5 (1991)). Similarly, the molecule can be closely related to the natural receptor to which the polypeptide binds, or at least, a fragment of the receptor capable of being bound by the polypeptide (e.g., active site). In either case, the molecule can be rationally designed using known techniques.

[2140] Preferably, the screening for these molecules involves producing appropriate cells which express the polypeptide. Preferred cells include cells from mammals, yeast, Drosophila, or E. coli. Cells expressing the polypeptide (or cell membrane containing the expressed polypeptide) are then preferably contacted with a test compound potentially containing the molecule to observe binding, stimulation, or inhibition of activity of either the polypeptide or the molecule.

[2141] The assay may simply test binding of a candidate compound to the polypeptide, wherein binding is detected by a label, or in an assay involving competition with a labeled competitor. Further, the assay may test whether the candidate compound results in a signal generated by binding to the polypeptide.

[2142] Alternatively, the assay can be carried out using cell-free preparations, polypeptide/molecule affixed to a solid support, chemical libraries, or natural product mixtures. The assay may also simply comprise the steps of mixing a candidate compound with a solution containing a polypeptide, measuring polypeptide/molecule activity or binding, and comparing the polypeptide/molecule activity or binding to a standard.

[2143] Preferably, an ELISA assay can measure polypeptide level or activity in a sample (e.g., biological sample) using a monoclonal or polyclonal antibody. The antibody can measure polypeptide level or activity by either binding, directly or indirectly, to the polypeptide or by competing with the polypeptide for a substrate.

[2144] Additionally, the receptor to which the polypeptide of the present invention binds can be identified by numerous methods known to those of skill in the art, for example, ligand panning and FACS sorting (Coligan, et al., Current Protocols in Immun., 1(2), Chapter 5, (1991)). For example, expression cloning is employed wherein polyadenylated RNA is prepared from a cell responsive to the polypeptides, for example, NIH3T3 cells which are known to contain multiple receptors for the FGF family proteins, and SC-3 cells, and a cDNA library created from this RNA is divided into pools and used to transfect COS cells or other cells that are not responsive to the polypeptides. Transfected cells which are grown on glass slides are exposed to the polypeptide of the present invention, after they have been labeled. The polypeptides can be labeled by a variety of means including iodination or inclusion of a recognition site for a site-specific protein kinase.

[2145] Following fixation and incubation, the slides are subjected to auto-radiographic analysis. Positive pools are identified and sub-pools are prepared and re-transfected using an iterative sub-pooling and re-screening process, eventually yielding a single clones that encodes the putative receptor.

[2146] As an alternative approach for receptor identification, the labeled polypeptides can be photoaffinity linked with cell membrane or extract preparations that express the receptor molecule. Cross-linked material is resolved by PAGE analysis and exposed to X-ray film. The labeled complex containing the receptors of the polypeptides can be excised, resolved into peptide fragments, and subjected to protein microsequencing. The amino acid sequence obtained from microsequencing would be used to design a set of degenerate oligonucleotide probes to screen a cDNA library to identify the genes encoding the putative receptors.

[2147] Moreover, the techniques of gene-shuffling, motif-shuffling, exon-shuffling, and/or codon-shuffling (collectively referred to as “DNA shuffling”) may be employed to modulate the activities of the polypeptide of the present invention thereby effectively generating agonists and antagonists of the polypeptide of the present invention. See generally, U.S. Pat. Nos. 5,605,793, 5,811,238, 5,830,721, 5,834,252, and 5,837,458, and Patten, P. A., et al., Curr. Opinion Biotechnol. 8:724-33 (1997); Harayama, S. Trends Biotechnol. 16(2):76-82 (1998); Hansson, L. O., et al., J. Mol. Biol. 287:265-76 (1999); and Lorenzo, M. M. and Blasco, R. Biotechniques 24(2):308-13 (1998); each of these patents and publications are hereby incorporated by reference). In one embodiment, alteration of polynucleotides and corresponding polypeptides may be achieved by DNA shuffling. DNA shuffling involves the assembly of two or more DNA segments into a desired molecule by homologous, or site-specific, recombination. In another embodiment, polynucleotides and corresponding polypeptides may be altered by being subjected to random mutagenesis by error-prone PCR, random nucleotide insertion or other methods prior to recombination. In another embodiment, one or more components, motifs, sections, parts, domains, fragments, etc., of the polypeptide of the present invention may be recombined with one or more components, motifs, sections, parts, domains, fragments, etc. of one or more heterologous molecules. In preferred embodiments, the heterologous molecules are family members. In further preferred embodiments, the heterologous molecule is a growth factor such as, for example, platelet-derived growth factor (PDGF), insulin-like growth factor (IGF-1), transforming growth factor (TGF)-alpha, epidermal growth factor (EGF), fibroblast growth factor (FGF), TGF-beta, bone morphogenetic protein (BMP)-2, BMP-4, BMP-5, BMP-6, BMP-7, activins A and B, decapentaplegic (dpp), 60A, OP-2, dorsalin, growth differentiation factors (GDFs), nodal, MIS, inhibin-alpha, TGF-beta1, TGF-beta2, TGF-beta3, TGF-beta5, and glial-derived neurotrophic factor (GDNF).

[2148] Other preferred fragments are biologically active fragments of the polypeptide of the present invention. Biologically active fragments are those exhibiting activity similar, but not necessarily identical, to an activity of the polypeptide of the present invention. The biological activity of the fragments may include an improved desired activity, or a decreased undesirable activity.

[2149] Additionally, this invention provides a method of screening compounds to identify those which modulate the action of the polypeptide of the present invention. An example of such an assay comprises combining a mammalian fibroblast cell, a the polypeptide of the present invention, the compound to be screened and 3[H] thymidine under cell culture conditions where the fibroblast cell would normally proliferate. A control assay may be performed in the absence of the compound to be screened and compared to the amount of fibroblast proliferation in the presence of the compound to determine if the compound stimulates proliferation by determining the uptake of 3 [H] thymidine in each case. The amount of fibroblast cell proliferation is measured by liquid scintillation chromatography which measures the incorporation of 3 [H] thymidine. Both agonist and antagonist compounds may be identified by this procedure.

[2150] In another method, a mammalian cell or membrane preparation expressing a receptor for a polypeptide of the present invention is incubated with a labeled polypeptide of the present invention in the presence of the compound. The ability of the compound to enhance or block this interaction could then be measured. Alternatively, the response of a known second messenger system following interaction of a compound to be screened and the receptor is measured and the ability of the compound to bind to the receptor and elicit a second messenger response is measured to determine if the compound is a potential agonist or antagonist. Such second messenger systems include but are not limited to, cAMP guanylate cyclase, ion channels or phosphoinositide hydrolysis.

[2151] All of these above assays can be used as diagnostic or prognostic markers. The molecules discovered using these assays can be used to treat disease or to bring about a particular result in a patient (e.g., blood vessel growth) by activating or inhibiting the polypeptide/molecule. Moreover, the assays can discover agents which may inhibit or enhance the production of the polypeptides of the invention from suitably manipulated cells or tissues.

[2152] Therefore, the invention includes a method of identifying compounds which bind to a polypeptide of the invention comprising the steps of: (a) incubating a candidate binding compound with a polypeptide of the present invention; and (b) determining if binding has occurred. Moreover, the invention includes a method of identifying agonists/antagonists comprising the steps of: (a) incubating a candidate compound with a polypeptide of the present invention, (b) assaying a biological activity, and (b) determining if a biological activity of the polypeptide has been altered.

[2153] Targeted Delivery

[2154] In another embodiment, the invention provides a method of delivering compositions to targeted cells expressing a receptor for a polypeptide of the invention, or cells expressing a cell bound form of a polypeptide of the invention.

[2155] As discussed herein, polypeptides or antibodies of the invention may be associated with heterologous polypeptides, heterologous nucleic acids, toxins, or prodrugs via hydrophobic, hydrophilic, ionic and/or covalent interactions. In one embodiment, the invention provides a method for the specific delivery of compositions of the invention to cells by administering polypeptides of the invention (including antibodies) that are associated with heterologous polypeptides or nucleic acids. In one example, the invention provides a method for delivering a therapeutic protein into the targeted cell. In another example, the invention provides a method for delivering a single stranded nucleic acid (e.g., antisense or ribozymes) or double stranded nucleic acid (e.g., DNA that can integrate into the cell's genome or replicate episomally and that can be transcribed) into the targeted cell.

[2156] In another embodiment, the invention provides a method for the specific destruction of cells (e.g., the destruction of tumor cells) by administering polypeptides of the invention (e.g., polypeptides of the invention or antibodies of the invention) in association with toxins or cytotoxic prodrugs.

[2157] By “toxin” is meant compounds that bind and activate endogenous cytotoxic effector systems, radioisotopes, holotoxins, modified toxins, catalytic subunits of toxins, or any molecules or enzymes not normally present in or on the surface of a cell that under defined conditions cause the cell's death. Toxins that may be used according to the methods of the invention include, but are not limited to, radioisotopes known in the art, compounds such as, for example, antibodies (or complement fixing containing portions thereof) that bind an inherent or induced endogenous cytotoxic effector system, thymidine kinase, endonuclease, RNAse, alpha toxin, ricin, abrin, Pseudomonas exotoxin A, diphtheria toxin, saporin, momordin, gelonin, pokeweed antiviral protein, alpha-sarcin and cholera toxin. By “cytotoxic prodrug” is meant a non-toxic compound that is converted by an enzyme, normally present in the cell, into a cytotoxic compound. Cytotoxic prodrugs that may be used according to the methods of the invention include, but are not limited to, glutamyl derivatives of benzoic acid mustard alkylating agent, phosphate derivatives of etoposide or mitomycin C, cytosine arabinoside, daunorubisin, and phenoxyacetamide derivatives of doxorubicin.

[2158] Drug Screening

[2159] Further contemplated is the use of the polypeptides of the present invention, or the polynucleotides encoding these polypeptides, to screen for molecules which modify the activities of the polypeptides of the present invention. Such a method would include contacting the polypeptide of the present invention with a selected compound(s) suspected of having antagonist or agonist activity, and assaying the activity of these polypeptides following binding.

[2160] This invention is particularly useful for screening therapeutic compounds by using the polypeptides of the present invention, or binding fragments thereof, in any of a variety of drug screening techniques. The polypeptide or fragment employed in such a test may be affixed to a solid support, expressed on a cell surface, free in solution, or located intracellularly. One method of drug screening utilizes eukaryotic or prokaryotic host cells which are stably transformed with recombinant nucleic acids expressing the polypeptide or fragment. Drugs are screened against such transformed cells in competitive binding assays. One may measure, for example, the formulation of complexes between the agent being tested and a polypeptide of the present invention.

[2161] Thus, the present invention provides methods of screening for drugs or any other agents which affect activities mediated by the polypeptides of the present invention. These methods comprise contacting such an agent with a polypeptide of the present invention or a fragment thereof and assaying for the presence of a complex between the agent and the polypeptide or a fragment thereof, by methods well known in the art. In such a competitive binding assay, the agents to screen are typically labeled. Following incubation, free agent is separated from that present in bound form, and the amount of free or uncomplexed label is a measure of the ability of a particular agent to bind to the polypeptides of the present invention.

[2162] Another technique for drug screening provides high throughput screening for compounds having suitable binding affinity to the polypeptides of the present invention, and is described in great detail in European Patent Application 84/03564, published on Sep. 13, 1984, which is incorporated herein by reference herein. Briefly stated, large numbers of different small peptide test compounds are synthesized on a solid substrate, such as plastic pins or some other surface. The peptide test compounds are reacted with polypeptides of the present invention and washed. Bound polypeptides are then detected by methods well known in the art. Purified polypeptides are coated directly onto plates for use in the aforementioned drug screening techniques. In addition, non-neutralizing antibodies may be used to capture the peptide and immobilize it on the solid support.

[2163] This invention also contemplates the use of competitive drug screening assays in which neutralizing antibodies capable of binding polypeptides of the present invention specifically compete with a test compound for binding to the polypeptides or fragments thereof. In this manner, the antibodies are used to detect the presence of any peptide which shares one or more antigenic epitopes with a polypeptide of the invention.

[2164] Polypeptides of the Invention Binding Peptides and Other Molecules

[2165] The invention also encompasses screening methods for identifying polypeptides and nonpolypeptides that bind polypeptides of the invention, and the polypeptide of the invention binding molecules identified thereby. These binding molecules are useful, for example, as agonists and antagonists of the polypeptides of the invention. Such agonists and antagonists can be used, in accordance with the invention, in the therapeutic embodiments described in detail, below.

[2166] This method comprises the steps of: contacting a polypeptide of the invention with a plurality of molecules; and identifying a molecule that binds the polypeptide of the invention.

[2167] The step of contacting the polypeptide of the invention with the plurality of molecules may be effected in a number of ways. For example, one may contemplate immobilizing the polypeptide of the invention on a solid support and bringing a solution of the plurality of molecules in contact with the immobilized polypeptide of the invention. Such a procedure would be akin to an affinity chromatographic process, with the affinity matrix being comprised of the immobilized polypeptide of the invention. The molecules having a selective affinity for the polypeptide of the invention can then be purified by affinity selection. The nature of the solid support, process for attachment of the polypeptide of the invention to the solid support, solvent, and conditions of the affinity isolation or selection are largely conventional and well known to those of ordinary skill in the art.

[2168] Alternatively, one may also separate a plurality of polypeptides into substantially separate fractions comprising a subset of or individual polypeptides. For instance, one can separate the plurality of polypeptides by gel electrophoresis, column chromatography, or like method known to those of ordinary skill for the separation of polypeptides. The individual polypeptides can also be produced by a transformed host cell in such a way as to be expressed on or about its outer surface (e.g., a recombinant phage). Individual isolates can then be “probed” by the polypeptide of the invention, optionally in the presence of an inducer should one be required for expression, to determine if any selective affinity interaction takes place between the polypeptide of the invention and the individual clone. Prior to contacting the polypeptide of the invention with each fraction comprising individual polypeptides, the polypeptides could first be transferred to a solid support for additional convenience. Such a solid support may simply be a piece of filter membrane, such as one made of nitrocellulose or nylon. In this manner, positive clones could be identified from a collection of transformed host cells of an expression library, which harbor a DNA construct encoding a polypeptide having a selective affinity for a polypeptide of the invention. Furthermore, the amino acid sequence of the polypeptide having a selective affinity for the polypeptide of the invention can be determined directly by conventional means or the coding sequence of the DNA encoding the polypeptide can frequently be determined more conveniently. The primary sequence can then be deduced from the corresponding DNA sequence. If the amino acid sequence is to be determined from the polypeptide itself, one may use microsequencing techniques. The sequencing technique may include mass spectroscopy.

[2169] In certain situations, it may be desirable to wash away any unbound polypeptide of the invention, or alterntatively, unbound polypeptides, from a mixture of the polypeptide of the invention and the plurality of polypeptides prior to attempting to determine or to detect the presence of a selective affinity interaction. Such a wash step may be particularly desirable when the polypeptide of the invention or the plurality of polypeptides is bound to a solid support.

[2170] The plurality of molecules provided according to this method may be provided by way of diversity libraries, such as random or combinatorial peptide or nonpeptide libraries which can be screened for molecules that specifically bind to a polypeptide of the invention. Many libraries are known in the art that can be used, e.g., chemically synthesized libraries, recombinant (e.g., phage display libraries), and in vitro translation-based libraries. Examples of chemically synthesized libraries are described in Fodor et al., 1991, Science 251:767-773; Houghten et al., 1991, Nature 354:84-86; Lam et al., 1991, Nature 354:82-84; Medynski, 1994, Bio/Technology 12:709-710; Gallop et al., 1994, J. Medicinal Chemistry 37(9):1233-1251; Ohlmeyer et al., 1993, Proc. Natl. Acad. Sci. USA 90:10922-10926; Erb et al., 1994, Proc. Natl. Acad. Sci. USA 91:11422-11426; Houghten et al., 1992, Biotechniques 13:412; Jayawickreme et al., 1994, Proc. Natl. Acad. Sci. USA 91:1614-1618; Salmon et al., 1993, Proc. Natl. Acad. Sci. USA 90:11708-11712; PCT Publication No. WO 93/20242; and Brenner and Lemer, 1992, Proc. Natl. Acad. Sci. USA 89:5381-5383.

[2171] Examples of phage display libraries are described in Scott and Smith, 1990, Science 249:386-390; Devlin et al., 1990, Science, 249:404-406; Christian, R. B., et al., 1992, J. Mol. Biol. 227:711-718); Lenstra, 1992, J. Immunol. Meth. 152:149-157; Kay et al., 1993, Gene 128:59-65; and PCT Publication No. WO 94/18318 dated Aug. 18, 1994.

[2172] In vitro translation-based libraries include but are not limited to those described in PCT Publication No. WO 91/05058 dated Apr. 18, 1991; and Mattheakis et al., 1994, Proc. Natl. Acad. Sci. USA 91:9022-9026.

[2173] By way of examples of nonpeptide libraries, a benzodiazepine library (see e.g., Bunin et al., 1994, Proc. Natl. Acad. Sci. USA 91:4708-4712) can be adapted for use. Peptoid libraries (Simon et al., 1992, Proc. Natl. Acad. Sci. USA 89:9367-9371) can also be used. Another example of a library that can be used, in which the amide functionalities in peptides have been pennethylated to generate a chemically transformed combinatorial library, is described by Ostresh et al. (1994, Proc. Natl. Acad. Sci. USA 91:11138-11142).

[2174] The variety of non-peptide libraries that are useful in the present invention is great. For example, Ecker and Crooke, 1995, Bio/Technology 13:351-360 list benzodiazepines, hydantoins, piperazinediones, biphenyls, sugar analogs, beta-mercaptoketones, arylacetic acids, acylpiperidines, benzopyrans, cubanes, xanthines, aminimides, and oxazolones as among the chemical species that form the basis of various libraries.

[2175] Non-peptide libraries can be classified broadly into two types: decorated monomers and oligomers. Decorated monomer libraries employ a relatively simple scaffold structure upon which a variety functional groups is added. Often the scaffold will be a molecule with a known useful pharmacological activity. For example, the scaffold might be the benzodiazepine structure.

[2176] Non-peptide oligomer libraries utilize a large number of monomers that are assembled together in ways that create new shapes that depend on the order of the monomers. Among the monomer units that have been used are carbamates, pyrrolinones, and morpholinos. Peptoids, peptide-like oligomers in which the side chain is attached to the alpha amino group rather than the alpha carbon, form the basis of another version of non-peptide oligomer libraries. The first non-peptide oligomer libraries utilized a single type of monomer and thus contained a repeating backbone. Recent libraries have utilized more than one monomer, giving the libraries added flexibility.

[2177] Screening the libraries can be accomplished by any of a variety of commonly known methods. See, e.g., the following references, which disclose screening of peptide libraries: Parmley and Smith, 1989, Adv. Exp. Med. Biol. 251:215-218; Scott and Smith, 1990, Science 249:386-390; Fowlkes et al., 1992; BioTechniques 13:422-427; Oldenburg et al., 1992, Proc. Natl. Acad. Sci. USA 89:5393-5397; Yu et al., 1994, Cell 76:933-945; Staudt et al., 1988, Science 241:577-580; Bock et al., 1992, Nature 355:564-566; Tuerk et al., 1992, Proc. Natl. Acad. Sci. USA 89:6988-6992; Ellington et al., 1992, Nature 355:850-852; U.S. Pat. No. 5,096,815, U.S. Pat. No. 5,223,409, and U.S. Pat. No. 5,198,346, all to Ladner et al.; Rebar and Pabo, 1993, Science 263:671-673; and CT Publication No. WO 94/18318.

[2178] In a specific embodiment, screening to identify a molecule that binds a polypeptide of the invention can be carried out by contacting the library members with a polypeptide of the invention immobilized on a solid phase and harvesting those library members that bind to the polypeptide of the invention. Examples of such screening methods, termed “panning” techniques are described by way of example in Parmley and Smith, 1988, Gene 73:305-318; Fowlkes et al., 1992, BioTechniques 13:422-427; PCT Publication No. WO 94/18318; and in references cited herein.

[2179] In another embodiment, the two-hybrid system for selecting interacting proteins in yeast (Fields and Song, 1989, Nature 340:245-246; Chien et al., 1991, Proc. Natl. Acad. Sci. USA 88:9578-9582) can be used to identify molecules that specifically bind to a polypeptide of the invention.

[2180] Where the polypeptide of the invention binding molecule is a polypeptide, the polypeptide can be conveniently selected from any peptide library, including random peptide libraries, combinatorial peptide libraries, or biased peptide libraries. The term “biased” is used herein to mean that the method of generating the library is manipulated so as to restrict one or more parameters that govern the diversity of the resulting collection of molecules, in this case peptides.

[2181] Thus, a truly random peptide library would generate a collection of peptides in which the probability of finding a particular amino acid at a given position of the peptide is the same for all 20 amino acids. A bias can be introduced into the library, however, by specifying, for example, that a lysine occur every fifth amino acid or that positions 4, 8, and 9 of a decapeptide library be fixed to include only arginine. Clearly, many types of biases can be contemplated, and the present invention is not restricted to any particular bias. Furthermore, the present invention contemplates specific types of peptide libraries, such as phage displayed peptide libraries and those that utilize a DNA construct comprising a lambda phage vector with a DNA insert.

[2182] As mentioned above, in the case of a polypeptide of the invention binding molecule that is a polypeptide, the polypeptide may have about 6 to less than about 60 amino acid residues, preferably about 6 to about 10 amino acid residues, and most preferably, about 6 to about 22 amino acids. In another embodiment, a polypeptide of the invention binding polypeptide has in the range of 15-100 amino acids, or 20-50 amino acids.

[2183] The selected polypeptide of the invention binding polypeptide can be obtained by chemical synthesis or recombinant expression.

[2184] Antisense And Ribozyme (Antagonists)

[2185] In specific embodiments, antagonists according to the present invention are nucleic acids corresponding to the sequences contained in SEQ ID NO:X, or the complementary strand thereof, and/or to nucleotide sequences contained a deposited clone. In one embodiment, antisense sequence is generated internally by the organism, in another embodiment, the antisense sequence is separately administered (see, for example, O'Connor, Neurochem., 56:560 (1991). Oligodeoxynucleotides as Anitsense Inhibitors of Gene Expression, CRC Press, Boca Raton, Fla. (1988). Antisense technology can be used to control gene expression through antisense DNA or RNA, or through triple-helix formation. Antisense techniques are discussed for example, in Okano, Neurochem., 56:560 (1991); Oligodeoxynucleotides as Antisense Inhibitors of Gene Expression, CRC Press, Boca Raton, Fla. (1988). Triple helix formation is discussed in, for instance, Lee et al., Nucleic Acids Research, 6:3073 (1979); Cooney et al., Science, 241:456 (1988); and Dervan et al., Science, 251:1300 (1991). The methods are based on binding of a polynucleotide to a complementary DNA or RNA.

[2186] For example, the use of c-myc and c-myb antisense RNA constructs to inhibit the growth of the non-lymphocytic leukemia cell line HL-60 and other cell lines was previously described. (Wickstrom et al. (1988); Anfossi et al. (1989)). These experiments were performed in vitro by incubating cells with the oligoribonucleotide. A similar procedure for in vivo use is described in WO 91/15580. Briefly, a pair of oligonucleotides for a given antisense RNA is produced as follows: A sequence complimentary to the first 15 bases of the open reading frame is flanked by an EcoRI site on the 5 end and a HindIII site on the 3 end. Next, the pair of oligonucleotides is heated at 90° C. for one minute and then annealed in 2×ligation buffer (20 mM TRIS HCl pH 7.5, 10 mM MgCl2, 10 MM dithiothreitol (DTT) and 0.2 mM ATP) and then ligated to the EcoRI/Hind III site of the retroviral vector PMV7 (WO 91/15580).

[2187] For example, the 5′ coding portion of a polynucleotide that encodes the mature polypeptide of the present invention may be used to design an antisense RNA oligonucleotide of from about 10 to 40 base pairs in length. A DNA oligonucleotide is designed to be complementary to a region of the gene involved in transcription thereby preventing transcription and the production of the receptor. The antisense RNA oligonucleotide hybridizes to the mRNA in vivo and blocks translation of the mRNA molecule into receptor polypeptide.

[2188] In one embodiment, the antisense nucleic acid of the invention is produced intracellularly by transcription from an exogenous sequence. For example, a vector or a portion thereof, is transcribed, producing an antisense nucleic acid (RNA) of the invention. Such a vector would contain a sequence encoding the antisense nucleic acid of the invention. Such a vector can remain episomal or become chromosomally integrated, as long as it can be transcribed to produce the desired antisense RNA. Such vectors can be constructed by recombinant DNA technology methods standard in the art. Vectors can be plasmid, viral, or others known in the art, used for replication and expression in vertebrate cells. Expression of the sequence encoding a polypeptide of the invention, or fragments thereof, can be by any promoter known in the art to act in vertebrate, preferably human cells. Such promoters can be inducible or constitutive. Such promoters include, but are not limited to, the SV40 early promoter region (Bemoist and Chambon, Nature, 29:304-310 (1981), the promoter contained in the 3′ long terminal repeat of Rous sarcoma virus (Yamamoto et al., Cell, 22:787-797 (1980), the herpes thymidine promoter (Wagner et al., Proc. Natl. Acad. Sci. U.S.A., 78:1441-1445 (1981), the regulatory sequences of the metallothionein gene (Brinster et al., Nature, 296:39-42 (1982)), etc.

[2189] The antisense nucleic acids of the invention comprise a sequence complementary to at least a portion of an RNA transcript of a gene of interest. However, absolute complementarity, although preferred, is not required. A sequence “complementary to at least a portion of an RNA,” referred to herein, means a sequence having sufficient complementarity to be able to hybridize with the RNA, forming a stable duplex; in the case of double stranded antisense nucleic acids of the invention, a single strand of the duplex DNA may thus be tested, or triplex formation may be assayed. The ability to hybridize will depend on both the degree of complementarity and the length of the antisense nucleic acid Generally, the larger the hybridizing nucleic acid, the more base mismatches with a RNA sequence of the invention it may contain and still form a stable duplex (or triplex as the case may be). One skilled in the art can ascertain a tolerable degree of mismatch by use of standard procedures to determine the melting point of the hybridized complex.

[2190] Oligonucleotides that are complementary to the 5′ end of the message, e.g., the 5′ untranslated sequence up to and including the AUG initiation codon, should work most efficiently at inhibiting translation. However, sequences complementary to the 3′ untranslated sequences of mRNAs have been shown to be effective at inhibiting translation of mRNAs as well. See generally, Wagner, R., Nature, 372:333-335 (1994). Thus, oligonucleotides complementary to either the 5′- or 3′-non-translated, non-coding regions of a polynucleotide sequence of the invention could be used in an antisense approach to inhibit translation of endogenous mRNA. Oligonucleotides complementary to the 5′ untranslated region of the mRNA should include the complement of the AUG start codon. Antisense oligonucleotides complementary to mRNA coding regions are less efficient inhibitors of translation but could be used in accordance with the invention. Whether designed to hybridize to the 5′-, 3′- or coding region of mRNA, antisense nucleic acids should be at least six nucleotides in length, and are preferably oligonucleotides ranging from 6 to about 50 nucleotides in length. In specific aspects the oligonucleotide is at least 10 nucleotides, at least 17 nucleotides, at least 25 nucleotides or at least 50 nucleotides.

[2191] The polynucleotides of the invention can be DNA or RNA or chimeric mixtures or derivatives or modified versions thereof, single-stranded or double-stranded. The oligonucleotide can be modified at the base moiety, sugar moiety, or phosphate backbone, for example, to improve stability of the molecule, hybridization, etc. The oligonucleotide may include other appended groups such as peptides (e.g., for targeting host cell receptors in vivo), or agents facilitating transport across the cell membrane (see, e.g., Letsinger et al., Proc. Natl. Acad. Sci. U.S.A. 86:6553-6556 (1989); Lemaitre et al., Proc. Natl. Acad. Sci., 84:648-652 (1987); PCT Publication NO: WO88/09810, published Dec. 15, 1988) or the blood-brain barrier (see, e.g., PCT Publication NO: WO89/10134, published Apr. 25, 1988), hybridization-triggered cleavage agents. (See, e.g., Krol et al., BioTechniques, 6:958-976 (1988)) or intercalating agents. (See, e.g., Zon, Pharm. Res., 5:539-549 (1988)). To this end, the oligonucleotide may be conjugated to another molecule, e.g., a peptide, hybridization triggered cross-linking agent, transport agent, hybridization-triggered cleavage agent, etc.

[2192] The antisense oligonucleotide may comprise at least one modified base moiety which is selected from the group including, but not limited to, 5-fluorouracil, 5-bromouracil, 5-chlorouracil, 5-iodouracil, hypoxanthine, xantine, 4-acetylcytosine, 5-(carboxyhydroxylmethyl) uracil, 5-carboxymethylaminomethyl-2-thiouridine, 5-carboxymethylaminomethyluracil, dihydrouracil, beta-D-galactosylqueosine, inosine, N6-isopentenyladenine, 1-methylguanine, 1-methylinosine, 2,2-dimethylguanine, 2-methyladenine, 2-methylguanine, 3-methylcytosine, 5-methylcytosine, N6-adenine, 7-methylguanine, 5-methylaminomethyluracil, 5-methoxyaminomethyl-2-thiouracil, beta-D-mannosylqueosine, 5′-methoxycarboxymethyluracil, 5-methoxyuracil, 2-methylthio-N6-isopentenyladenine, uracil-5-oxyacetic acid (v), wybutoxosine, pseudouracil, queosine, 2-thiocytosine, 5-methyl-2-thiouracil, 2-thiouracil, 4-thiouracil, 5-methyluracil, uracil-5-oxyacetic acid methylester, uracil-5-oxyacetic acid (v), 5-methyl-2-thiouracil, 3-(3-amino-3-N-2-carboxypropyl) uracil, (acp3)w, and 2,6-diaminopurine.

[2193] The antisense oligonucleotide may also comprise at least one modified sugar moiety selected from the group including, but not limited to, arabinose, 2-fluoroarabinose, xylulose, and hexose.

[2194] In yet another embodiment, the antisense oligonucleotide comprises at least one modified phosphate backbone selected from the group including, but not limited to, a phosphorothioate, a phosphorodithioate, a phosphoramidothioate, a phosphoramidate, a phosphordiamidate, a methylphosphonate, an alkyl phosphotriester, and a formacetal or analog thereof.

[2195] In yet another embodiment, the antisense oligonucleotide is an a-anomeric oligonucleotide. An a-anomeric oligonucleotide forms specific double-stranded hybrids with complementary RNA in which, contrary to the usual b-units, the strands run parallel to each other (Gautier et al., Nucl. Acids Res., 15:6625-6641 (1987)). The oligonucleotide is a 2-O-methylribonucleotide (Inoue et al., Nucl. Acids Res., 15:6131-6148 (1987)), or a chimeric RNA-DNA analogue (Inoue et al., FEBS Lett. 215:327-330 (1987)).

[2196] Polynucleotides of the invention may be synthesized by standard methods known in the art, e.g. by use of an automated DNA synthesizer (such as are commercially available from Biosearch, Applied Biosystems, etc.). As examples, phosphorothioate oligonucleotides may be synthesized by the method of Stein et al. (Nucl. Acids Res., 16:3209 (1988)), methylphosphonate oligonucleotides can be prepared by use of controlled pore glass polymer supports (Sarin et al., Proc. Natl. Acad. Sci. U.S.A., 85:7448-7451 (1988)), etc.

[2197] While antisense nucleotides complementary to the coding region sequence of the invention could be used, those complementary to the transcribed untranslated region are most preferred.

[2198] Potential antagonists according to the invention also include catalytic RNA, or a ribozyme (See, e.g., PCT International Publication WO 90/11364, published Oct. 4, 1990; Sarver et al, Science, 247:1222-1225 (1990). While ribozymes that cleave mRNA at site specific recognition sequences can be used to destroy mRNAs corresponding to the polynucleotides of the invention, the use of hammerhead ribozymes is preferred. Hammerhead ribozymes cleave mRNAs at locations dictated by flanking regions that form complementary base pairs with the target mRNA. The sole requirement is that the target mRNA have the following sequence of two bases: 5′-UG-3′. The construction and production of hammerhead ribozymes is well known in the art and is described more fully in Haseloff and Gerlach, Nature, 334:585-591 (1988). There are numerous potential hammerhead ribozyme cleavage sites within each nucleotide sequence disclosed in the sequence listing. Preferably, the ribozyme is engineered so that the cleavage recognition site is located near the 5′ end of the mRNA corresponding to the polynucleotides of the invention; i.e., to increase efficiency and minimize the intracellular accumulation of non-functional mRNA transcripts.

[2199] As in the antisense approach, the ribozymes of the invention can be composed of modified oligonucleotides (e.g. for improved stability, targeting, etc.) and should be delivered to cells which express the polynucleotides of the invention in vivo. DNA constructs encoding the ribozyme may be introduced into the cell in the same manner as described above for the introduction of antisense encoding DNA. A preferred method of delivery involves using a DNA construct “encoding” the ribozyme under the control of a strong constitutive promoter, such as, for example, pol m or pol II promoter, so that transfected cells will produce sufficient quantities of the ribozyme to destroy endogenous messages and inhibit translation. Since ribozymes unlike antisense molecules, are catalytic, a lower intracellular concentration is required for efficiency.

[2200] Antagonist/agonist compounds may be employed to inhibit the cell growth and proliferation effects of the polypeptides of the present invention on neoplastic cells and tissues, i.e. stimulation of angiogenesis of tumors, and, therefore, retard or prevent abnormal cellular growth and proliferation, for example, in tumor formation or growth.

[2201] The antagonist/agonist may also be employed to prevent hyper-vascular diseases, and prevent the proliferation of epithelial lens cells after extracapsular cataract surgery. Prevention of the mitogenic activity of the polypeptides of the present invention may also be desirous in cases such as restenosis after balloon angioplasty.

[2202] The antagonist/agonist may also be employed to prevent the growth of scar tissue during wound healing.

[2203] The antagonist/agonist may also be employed to treat, prevent, and/or diagnose the diseases described herein.

[2204] Thus, the invention provides a method of treating or preventing diseases, disorders, and/or conditions, including but not limited to the diseases, disorders, and/or conditions listed throughout this application, associated with overexpression of a polynucleotide of the present invention by administering to a patient (a) an antisense molecule directed to the polynucleotide of the present invention, and/or (b) a ribozyme directed to the polynucleotide of the present invention.

[2205] invention, and/or (b) a ribozyme directed to the polynucleotide of the present invention

[2206] Other Activities

[2207] The polypeptide of the present invention, as a result of the ability to stimulate vascular endothelial cell growth, may be employed in treatment for stimulating re-vascularization of ischemic tissues due to various disease conditions such as thrombosis, arteriosclerosis, and other cardiovascular conditions. These polypeptide may also be employed to stimulate angiogenesis and limb regeneration, as discussed above.

[2208] The polypeptide may also be employed for treating wounds due to injuries, burns, post-operative tissue repair, and ulcers since they are mitogenic to various cells of different origins, such as fibroblast cells and skeletal muscle cells, and therefore, facilitate the repair or replacement of damaged or diseased tissue.

[2209] The polypeptide of the present invention may also be employed stimulate neuronal growth and to treat, prevent, and/or diagnose neuronal damage which occurs in certain neuronal disorders or neuro-degenerative conditions such as Alzheimer's disease, Parkinson's disease, and AIDS-related complex. The polypeptide of the invention may have the ability to stimulate chondrocyte growth, therefore, they may be employed to enhance bone and periodontal regeneration and aid in tissue transplants or bone grafts.

[2210] The polypeptide of the present invention may be also be employed to prevent skin aging due to sunburn by stimulating keratinocyte growth.

[2211] The polypeptide of the invention may also be employed for preventing hair loss, since FGF family members activate hair-forming cells and promotes melanocyte growth. Along the same lines, the polypeptides of the present invention may be employed to stimulate growth and differentiation of hematopoietic cells and bone marrow cells when used in combination with other cytokines.

[2212] The polypeptide of the invention may also be employed to maintain organs before transplantation or for supporting cell culture of primary tissues.

[2213] The polypeptide of the present invention may also be employed for inducing tissue of mesodermal origin to differentiate in early embryos.

[2214] The polypeptide or polynucleotides and/or agonist or antagonists of the present invention may also increase or decrease the differentiation or proliferation of embryonic stem cells, besides, as discussed above, hematopoietic lineage.

[2215] The polypeptide or polynucleotides and/or agonist or antagonists of the present invention may also be used to modulate mammalian characteristics, such as body height, weight, hair color, eye color, skin, percentage of adipose tissue, pigmentation, size, and shape (e.g., cosmetic surgery). Similarly, polypeptides or polynucleotides and/or agonist or antagonists of the present invention may be used to modulate mammalian metabolism affecting catabolism, anabolism, processing, utilization, and storage of energy.

[2216] A polypeptide, polynucleotide, agonist, or antagonist of the present invention may be used to treat weight disorders, including but not limited to, obesity, cachexia, wasting disease, anorexia, and bulimia.

[2217] Polypeptide or polynucleotides and/or agonist or antagonists of the present invention may be used to change a mammal's mental state or physical state by influencing biorhythms, caricadic rhythms, depression (including depressive diseases, disorders, and/or conditions), tendency for violence, tolerance for pain, reproductive capabilities (preferably by Activin or Inhibin-like activity), hormonal or endocrine levels, appetite, libido, memory, stress, or other cognitive qualities.

[2218] Polypeptide or polynucleotides and/or agonist or antagonists of the present invention may also be used as a food additive or preservative, such as to increase or decrease storage capabilities, fat content, lipid, protein, carbohydrate, vitamins, minerals, cofactors or other nutritional components.

[2219] Other Preferred Embodiments

[2220] Other preferred embodiments of the claimed invention include an isolated nucleic acid molecule comprising a nucleotide sequence which is at least 95% identical to a sequence of at least about 50 contiguous nucleotides in the nucleotide sequence of SEQ ID NO:X wherein X is any integer as defined in Table 1.

[2221] Also preferred is a nucleic acid molecule wherein said sequence of contiguous nucleotides is included in the nucleotide sequence of SEQ ID NO:X in the range of positions beginning with the nucleotide at about the position of the 5′ Nucleotide of the Clone Sequence and ending with the nucleotide at about the position of the 3′ Nucleotide of the Clone Sequence as defined for SEQ ID NO:X in Table 1.

[2222] Also preferred is a nucleic acid molecule wherein said sequence of contiguous nucleotides is included in the nucleotide sequence of SEQ ID NO:X in the range of positions beginning with the nucleotide at about the position of the 5′ Nucleotide of the Start Codon and ending with the nucleotide at about the position of the 3′ Nucleotide of the Clone Sequence as defined for SEQ ID NO:X in Table 1.

[2223] Similarly preferred is a nucleic acid molecule wherein said sequence of contiguous nucleotides is included in the nucleotide sequence of SEQ ID NO:X in the range of positions beginning with the nucleotide at about the position of the 5′ Nucleotide of the First Amino Acid of the Signal Peptide and ending with the nucleotide at about the position of the 3′ Nucleotide of the Clone Sequence as defined for SEQ ID NO:X in Table 1.

[2224] Also preferred is an isolated nucleic acid molecule comprising a nucleotide sequence which is at least 95% identical to a sequence of at least about 150 contiguous nucleotides in the nucleotide sequence of SEQ ID NO:X.

[2225] Further preferred is an isolated nucleic acid molecule comprising a nucleotide sequence which is at least 95% identical to a sequence of at least about 500 contiguous nucleotides in the nucleotide sequence of SEQ ID NO:X.

[2226] A further preferred embodiment is a nucleic acid molecule comprising a nucleotide sequence which is at least 95% identical to the nucleotide sequence of SEQ ID NO:X beginning with the nucleotide at about the position of the 5′ Nucleotide of the First Amino Acid of the Signal Peptide and ending with the nucleotide at about the position of the 3′ Nucleotide of the Clone Sequence as defined for SEQ ID NO:X in Table 1.

[2227] A further preferred embodiment is an isolated nucleic acid molecule comprising a nucleotide sequence which is at least 95% identical to the complete nucleotide sequence of SEQ ID NO:X.

[2228] Also preferred is an isolated nucleic acid molecule which hybridizes under stringent hybridization conditions to a nucleic acid molecule, wherein said nucleic acid molecule which hybridizes does not hybridize under stringent hybridization conditions to a nucleic acid molecule having a nucleotide sequence consisting of only A residues or of only T residues.

[2229] Also preferred is a composition of matter comprising a DNA molecule which comprises a human cDNA clone identified by a cDNA Clone Identifier in Table 1, which DNA molecule is contained in the material deposited with the American Type Culture Collection and given the ATCC Deposit Number shown in Table 1 for said cDNA Clone Identifier.

[2230] Also preferred is an isolated nucleic acid molecule comprising a nucleotide sequence which is at least 95% identical to a sequence of at least 50 contiguous nucleotides in the nucleotide sequence of a human cDNA clone identified by a cDNA Clone Identifier in Table 1, which DNA molecule is contained in the deposit given the ATCC Deposit Number shown in Table 1.

[2231] Also preferred is an isolated nucleic acid molecule, wherein said sequence of at least 50 contiguous nucleotides is included in the nucleotide sequence of the complete open reading frame sequence encoded by said human cDNA clone.

[2232] Also preferred is an isolated nucleic acid molecule comprising a nucleotide sequence which is at least 95% identical to sequence of at least 150 contiguous nucleotides in the nucleotide sequence encoded by said human cDNA clone.

[2233] A further preferred embodiment is an isolated nucleic acid molecule comprising a nucleotide sequence which is at least 95% identical to sequence of at least 500 contiguous nucleotides in the nucleotide sequence encoded by said human cDNA clone.

[2234] A further preferred embodiment is an isolated nucleic acid molecule comprising a nucleotide sequence which is at least 95% identical to the complete nucleotide sequence encoded by said human cDNA clone.

[2235] A further preferred embodiment is a method for detecting in a biological sample a nucleic acid molecule comprising a nucleotide sequence which is at least 95% identical to a sequence of at least 50 contiguous nucleotides in a sequence selected from the group consisting of: a nucleotide sequence of SEQ ID NO:X wherein X is any integer as defined in Table 1; and a nucleotide sequence encoded by a human cDNA clone identified by a cDNA Clone Identifier in Table 1 and contained in the deposit with the ATCC Deposit Number shown for said cDNA clone in Table 1; which method comprises a step of comparing a nucleotide sequence of at least one nucleic acid molecule in said sample with a sequence selected from said group and determining whether the sequence of said nucleic acid molecule in said sample is at least 95% identical to said selected sequence.

[2236] Also preferred is the above method wherein said step of comparing sequences comprises determining the extent of nucleic acid hybridization between nucleic acid molecules in said sample and a nucleic acid molecule comprising said sequence selected from said group. Similarly, also preferred is the above method wherein said step of comparing sequences is performed by comparing the nucleotide sequence determined from a nucleic acid molecule in said sample with said sequence selected from said group. The nucleic acid molecules can comprise DNA molecules or RNA molecules.

[2237] A further preferred embodiment is a method for identifying the species, tissue or cell type of a biological sample which method comprises a step of detecting nucleic acid molecules in said sample, if any, comprising a nucleotide sequence that is at least 95% identical to a sequence of at least 50 contiguous nucleotides in a sequence selected from the group consisting of: a nucleotide sequence of SEQ ID NO:X wherein X is any integer as defined in Table 1; and a nucleotide sequence encoded by a human cDNA clone identified by a cDNA Clone Identifier in Table 1 and contained in the deposit with the ATCC Deposit Number shown for said cDNA clone in Table 1.

[2238] The method for identifying the species, tissue or cell type of a biological sample can comprise a step of detecting nucleic acid molecules comprising a nucleotide sequence in a panel of at least two nucleotide sequences, wherein at least one sequence in said panel is at least 95% identical to a sequence of at least 50 contiguous nucleotides in a sequence selected from said group.

[2239] Also preferred is a method for diagnosing in a subject a pathological condition associated with abnormal structure or expression of a gene encoding a secreted protein identified in Table 1, which method comprises a step of detecting in a biological sample obtained from said subject nucleic acid molecules, if any, comprising a nucleotide sequence that is at least 95% identical to a sequence of at least 50 contiguous nucleotides in a sequence selected from the group consisting of: a nucleotide sequence of SEQ ID NO:X wherein X is any integer as defined in Table 1; and a nucleotide sequence encoded by a human cDNA clone identified by a cDNA Clone Identifier in Table 1 and contained in the deposit with the ATCC Deposit Number shown for said cDNA clone in Table 1.

[2240] The method for diagnosing a pathological condition can comprise a step of detecting nucleic acid molecules comprising a nucleotide sequence in a panel of at least two nucleotide sequences, wherein at least one sequence in said panel is at least 95% identical to a sequence of at least 50 contiguous nucleotides in a sequence selected from said group.

[2241] Also preferred is a composition of matter comprising isolated nucleic acid molecules wherein the nucleotide sequences of said nucleic acid molecules comprise a panel of at least two nucleotide sequences, wherein at least one sequence in said panel is at least 95% identical to a sequence of at least 50 contiguous nucleotides in a sequence selected from the group consisting of: a nucleotide sequence of SEQ ID NO:X wherein X is any integer as defined in Table 1; and a nucleotide sequence encoded by a human cDNA clone identified by a cDNA Clone Identifier in Table 1 and contained in the deposit with the ATCC Deposit Number shown for said cDNA clone in Table 1. The nucleic acid molecules can comprise DNA molecules or RNA molecules.

[2242] Also preferred is an isolated polypeptide comprising an amino acid sequence at least 90% identical to a sequence of at least about 10 contiguous amino acids in the amino acid sequence of SEQ ID NO:Y wherein Y is any integer as defined in Table 1.

[2243] Also preferred is a polypeptide, wherein said sequence of contiguous amino acids is included in the amino acid sequence of SEQ ID NO:Y in the range of positions beginning with the residue at about the position of the First Amino Acid of the Secreted Portion and ending with the residue at about the Last Amino Acid of the Open Reading Frame as set forth for SEQ ID NO:Y in Table 1.

[2244] Also preferred is an isolated polypeptide comprising an amino acid sequence at least 95% identical to a sequence of at least about 30 contiguous amino acids in the amino acid sequence of SEQ ID NO:Y.

[2245] Further preferred is an isolated polypeptide comprising an amino acid sequence at least 95% identical to a sequence of at least about 100 contiguous amino acids in the amino acid sequence of SEQ ID NO:Y.

[2246] Further preferred is an isolated polypeptide comprising an amino acid sequence at least 95% identical to the complete amino acid sequence of SEQ ID NO:Y.

[2247] Further preferred is an isolated polypeptide comprising an amino acid sequence at least 90% identical to a sequence of at least about 10 contiguous amino acids in the complete amino acid sequence of a secreted protein encoded by a human cDNA clone identified by a cDNA Clone Identifier in Table 1 and contained in the deposit with the ATCC Deposit Number shown for said cDNA clone in Table 1.

[2248] Also preferred is a polypeptide wherein said sequence of contiguous amino acids is included in the amino acid sequence of a secreted portion of the secreted protein encoded by a human cDNA clone identified by a cDNA Clone Identifier in Table 1 and contained in the deposit with the ATCC Deposit Number shown for said cDNA clone in Table 1.

[2249] Also preferred is an isolated polypeptide comprising an amino acid sequence at least 95% identical to a sequence of at least about 30 contiguous amino acids in the amino acid sequence of the secreted portion of the protein encoded by a human cDNA clone identified by a cDNA Clone Identifier in Table 1 and contained in the deposit with the ATCC Deposit Number shown for said cDNA clone in Table 1.

[2250] Also preferred is an isolated polypeptide comprising an amino acid sequence at least 95% identical to a sequence of at least about 100 contiguous amino acids in the amino acid sequence of the secreted portion of the protein encoded by a human cDNA clone identified by a cDNA Clone Identifier in Table 1 and contained in the deposit with the ATCC Deposit Number shown for said cDNA clone in Table 1.

[2251] Also preferred is an isolated polypeptide comprising an amino acid sequence at least 95% identical to the amino acid sequence of the secreted portion of the protein encoded by a human cDNA clone identified by a cDNA Clone Identifier in Table 1 and contained in the deposit with the ATCC Deposit Number shown for said cDNA clone in Table 1.

[2252] Further preferred is an isolated antibody which binds specifically to a polypeptide comprising an amino acid sequence that is at least 90% identical to a sequence of at least 10 contiguous amino acids in a sequence selected from the group consisting of: an amino acid sequence of SEQ ID NO:Y wherein Y is any integer as defined in Table 1; and a complete amino acid sequence of a protein encoded by a human cDNA clone identified by a cDNA Clone Identifier in Table 1 and contained in the deposit with the ATCC Deposit Number shown for said cDNA clone in Table 1.

[2253] Further preferred is a method for detecting in a biological sample a polypeptide comprising an amino acid sequence which is at least 90% identical to a sequence of at least 10 contiguous amino acids in a sequence selected from the group consisting of: an amino acid sequence of SEQ ID NO:Y wherein Y is any integer as defined in Table 1; and a complete amino acid sequence of a protein encoded by a human cDNA clone identified by a cDNA Clone Identifier in Table 1 and contained in the deposit with the ATCC Deposit Number shown for said cDNA clone in Table 1; which method comprises a step of comparing an amino acid sequence of at least one polypeptide molecule in said sample with a sequence selected from said group and determining whether the sequence of said polypeptide molecule in said sample is at least 90% identical to said sequence of at least 10 contiguous amino acids.

[2254] Also preferred is the above method wherein said step of comparing an amino acid sequence of at least one polypeptide molecule in said sample with a sequence selected from said group comprises determining the extent of specific binding of polypeptides in said sample to an antibody which binds specifically to a polypeptide comprising an amino acid sequence that is at least 90% identical to a sequence of at least 10 contiguous amino acids in a sequence selected from the group consisting of: an amino acid sequence of SEQ ID NO:Y wherein Y is any integer as defined in Table 1; and a complete amino acid sequence of a protein encoded by a human cDNA clone identified by a cDNA Clone Identifier in Table 1 and contained in the deposit with the ATCC Deposit Number shown for said cDNA clone in Table 1.

[2255] Also preferred is the above method wherein said step of comparing sequences is performed by comparing the amino acid sequence determined from a polypeptide molecule in said sample with said sequence selected from said group.

[2256] Also preferred is a method for identifying the species, tissue or cell type of a biological sample which method comprises a step of detecting polypeptide molecules in said sample, if any, comprising an amino acid sequence that is at least 90% identical to a sequence of at least 10 contiguous amino acids in a sequence selected from the group consisting of: an amino acid sequence of SEQ ID NO:Y wherein Y is any integer as defined in Table 1; and a complete amino acid sequence of a secreted protein encoded by a human cDNA clone identified by a cDNA Clone Identifier in Table 1 and contained in the deposit with the ATCC Deposit Number shown for said cDNA clone in Table 1.

[2257] Also preferred is the above method for identifying the species, tissue or cell type of a biological sample, which method comprises a step of detecting polypeptide molecules comprising an amino acid sequence in a panel of at least two amino acid sequences, wherein at least one sequence in said panel is at least 90% identical to a sequence of at least 10 contiguous amino acids in a sequence selected from the above group.

[2258] Also preferred is a method for diagnosing in a subject a pathological condition associated with abnormal structure or expression of a gene encoding a secreted protein identified in Table 1, which method comprises a step of detecting in a biological sample obtained from said subject polypeptide molecules comprising an amino acid sequence in a panel of at least two amino acid sequences, wherein at least one sequence in said panel is at least 90% identical to a sequence of at least 10 contiguous amino acids in a sequence selected from the group consisting of: an amino acid sequence of SEQ ID NO:Y wherein Y is any integer as defined in Table 1; and a complete amino acid sequence of a secreted protein encoded by a human cDNA clone identified by a cDNA Clone Identifier in Table 1 and contained in the deposit with the ATCC Deposit Number shown for said cDNA clone in Table 1.

[2259] In any of these methods, the step of detecting said polypeptide molecules includes using an antibody.

[2260] Also preferred is an isolated nucleic acid molecule comprising a nucleotide sequence which is at least 95% identical to a nucleotide sequence encoding a polypeptide wherein said polypeptide comprises an amino acid sequence that is at least 90% identical to a sequence of at least 10 contiguous amino acids in a sequence selected from the group consisting of: an amino acid sequence of SEQ ID NO:Y wherein Y is any integer as defined in Table 1; and a complete amino acid sequence of a secreted protein encoded by a human cDNA clone identified by a cDNA Clone Identifier in Table 1 and contained in the deposit with the ATCC Deposit Number shown for said cDNA clone in Table 1.

[2261] Also preferred is an isolated nucleic acid molecule, wherein said nucleotide sequence encoding a polypeptide has been optimized for expression of said polypeptide in a prokaryotic host.

[2262] Also preferred is an isolated nucleic acid molecule, wherein said polypeptide comprises an amino acid sequence selected from the group consisting of: an amino acid sequence of SEQ ID NO:Y wherein Y is any integer as defined in Table 1; and a complete amino acid sequence of a secreted protein encoded by a human cDNA clone identified by a cDNA Clone Identifier in Table 1 and contained in the deposit with the ATCC Deposit Number shown for said cDNA clone in Table 1.

[2263] Further preferred is a method of making a recombinant vector comprising inserting any of the above isolated nucleic acid molecule into a vector. Also preferred is the recombinant vector produced by this method. Also preferred is a method of making a recombinant host cell comprising introducing the vector into a host cell, as well as the recombinant host cell produced by this method.

[2264] Also preferred is a method of making an isolated polypeptide comprising culturing this recombinant host cell under conditions such that said polypeptide is expressed and recovering said polypeptide. Also preferred is this method of making an isolated polypeptide, wherein said recombinant host cell is a eukaryotic cell and said polypeptide is a secreted portion of a human secreted protein comprising an amino acid sequence selected from the group consisting of: an amino acid sequence of SEQ ID NO:Y beginning with the residue at the position of the First Amino Acid of the Secreted Portion of SEQ ID NO:Y wherein Y is an integer set forth in Table 1 and said position of the First Amino Acid of the Secreted Portion of SEQ ID NO:Y is defined in Table 1; and an amino acid sequence of a secreted portion of a protein encoded by a human cDNA clone identified by a cDNA Clone Identifier in Table 1 and contained in the deposit with the ATCC Deposit Number shown for said cDNA clone in Table 1. The isolated polypeptide produced by this method is also preferred.

[2265] Also preferred is a method of treatment of an individual in need of an increased level of a secreted protein activity, which method comprises administering to such an individual a pharmaceutical composition comprising an amount of an isolated polypeptide, polynucleotide, or antibody of the claimed invention effective to increase the level of said protein activity in said individual.

[2266] The above-recited applications have uses in a wide variety of hosts. Such hosts include, but are not limited to, human, murine, rabbit, goat, guinea pig, camel, horse, mouse, rat, hamster, pig, micro-pig, chicken, goat, cow, sheep, dog, cat, non-human primate, and human. In specific embodiments, the host is a mouse, rabbit, goat, guinea pig, chicken, rat, hamster, pig, sheep, dog or cat. In preferred embodiments, the host is a mammal. In most preferred embodiments, the host is a human.

[2267] In specific embodiments of the invention, for each “Contig ID” listed in the fourth column of Table 2, preferably excluded are one or more polynucleotides comprising, or alternatively consisting of, a nucleotide sequence referenced in the fifth column of Table 2 and described by the general formula of a-b, whereas a and b are uniquely determined for the corresponding SEQ ID NO:X referred to in column 3 of Table 2. Further specific embodiments are directed to polynucleotide sequences excluding one, two, three, four, or more of the specific polynucleotide sequences referred to in the fifth column of Table 2. In no way is this listing meant to encompass all of the sequences which may be excluded by the general formula, it is just a representative example. All references available through these accessions are hereby incorporated by reference in their entirety.

TABLE 2

| | | NT | | |
|---|---|---|---|---|
| | | SEQ | | |
| | | ID | | |
| | cDNA Clone | NO: | | |
| Gene No. | ID | X | Contig ID | Public Accession Numbers |
| 1 | HLHDS67 | 11 | 396448 | T84556, R77553, H77877, H96723, N22894, |
| | | | | N24112, N25474, N31281, N31410, N31809, |
| | | | | N42470, N58904, N59834, N67726, W03552, |
| | | | | W15430, W78090, W79576, W94783, W95299, |
| | | | | AA112608, AA126875, AA127799, AA133859, |
| | | | | AA169532, AA169601 |
| 2 | HLHDZ58 | 12 | 396869 | R44557, R44557, H15251, H16568 |
| 10 | HOUBE18 | 20 | 407070 | T97913, R21634, R47833, R49975, R54690, |
| | | | | R55015, R55153, R62188, R64576, R80153, |
| | | | | R80154, R81484, R81724, H13709, H13762, |
| | | | | H49782, N33449, N34466, N42422, N42873, |
| | | | | N50673, N53663, N73029, W44598, W73379, |
| | | | | W73403, AA088385 |
| 11 | HOUDL69 | 21 | 396821 | T98572, T98573, T99692, R46104, R46177, |
| | | | | R46104, R46177, R77699, R77698, R81185, |
| | | | | R81291, R84758, R84835, N73056, W88438, |
| | | | | W89202 |
| 12 | HPMFI71 | 22 | 407378 | R53416, R54007, H14084, H45951, H75270, |
| | | | | H75382, N27106, N40516, W37083, W37084, |
| | | | | W72173 |
| 15 | HPTBB03 | 25 | 399928 | T58022, T86930, R11711, T83207, T86107, |
| | | | | T96449, R17686, R36056, R36058, R49138, |
| | | | | R49140, R53540, R53651, R49138, R73230, |
| | | | | R76352, H06054, H13390, H14662, H17478, |
| | | | | H17586, H24833, H29049, H29151, H92319, |
| | | | | H92379, N24774, N32793, N42234, N94618, |
| | | | | W15347, W31392, W31984, W39439, W95395, |
| | | | | W95353, AA088664, AA088803, AA102451, |
| | | | | AA130481, AA130482, AA143411, AA143667, |
| | | | | AA146597, AA148224, AA148225, AA156280, |
| | | | | AA156391, AA158602, AA158959, AA158958, |
| | | | | AA158971, AA158970, AA164777 |
| 16 | HPTWA66 | 26 | 614220 | R32953, R48005, R52174, R53999, R94185, |
| | | | | N58829, N75247, W86429, AA024852, AA024935, |
| | | | | AA101581, AA101582, AA121348, AA121367, |
| | | | | AA135194, AA135274, AA149607, AA149718, |
| | | | | AA181794, AA461476, AA460122 |
| 16 | HPTWA66 | 219 | 408041 | T56759, T63654, R48005, R53999, N58829, |
| | | | | W86429, AA024852, AA101582, AA121348, |
| | | | | AA135194, AA149607 |
| 17 | HPTWC08 | 27 | 396380 | T77302, R21500, R35136, R41732, R42882, |
| | | | | R49522, R41732, R42882, R49522, H20938, |
| | | | | H41732, R85141, R88669, R88670, R88816, |
| | | | | R89638, R89643, R90743, R90777, R90782, |
| | | | | AA040665, AA127052 |
| 18 | HRGCZ46 | 28 | 400796 | T48000, T49441, T62059, T65112, T65179, |
| | | | | T92082, T78688, T79315, T83158, T85864, |
| | | | | R15724, R17015, R18665, R22674, R45966, |
| | | | | R45966, H24497, H27416, H44475, N50917, |
| | | | | N94040, W17223, W40134, W92875, W94259, |
| | | | | W94444, W94673, W94957, W95142, W95598, |
| | | | | W95853, N89726, AA045010, AA081572 |
| 19 | HSAVU34 | 29 | 724060 | T52500, T67115, T67116, T90451, R10617, |
| | | | | R10618, T82973, H05156, H10930, H10931, |
| | | | | H56169, H56385, H66700, H66701, H73933, |
| | | | | H74126, N32119, N57071, N59463, N67109, |
| | | | | N71110, N74124, N74136, W02046, W05471, |
| | | | | W19600, W23443, W24737, W35258, W37178, |
| | | | | W57794, W58026, W81529, W81530, AA079135, |
| | | | | AA121270, AA121423, AA151481, AA151504, |
| | | | | AA220993, AA226857, AA250826, AA252645, |
| | | | | AA428383 |
| 19 | HSAVU34 | 220 | 396807 | T52500, T67115, T67116, T90451, R10617, |
| | | | | R10618, T82973, H05156, H10930, H10931, |
| | | | | H56169, H56385, H66700, H66701, H73933, |
| | | | | H74126, N32119, N57071, N59463, N67109, |
| | | | | N71110, N74124, N74136, W02046, W05471, |
| | | | | W19600, W23443, W24737, W35258, W37178, |
| | | | | W57794, W58026, W81529, W81530, AA079135, |
| | | | | AA121270, AA121423, AA151481, AA151504 |
| 20 | HSDFW61 | 30 | 407496 | T55525, R10577, R10576, R11610, T78468, |
| | | | | T78545, T95431, R01101, R19400, H55969, |
| | | | | H84552, N24342, N26542, N35654, N39425, |
| | | | | N48541, N64022, N73360, N78008, N95084, |
| | | | | W23486, W67558, W67606, W69403, W73515, |
| | | | | W73497, W74493, W79090, N89865, AA015719, |
| | | | | AA034158, AA053058, AA053402, AA127181 |
| 22 | HSOAJ55 | 32 | 829668 | T90006, R09378, R09379, R12195, T82827, |
| | | | | T84829, R23136, R23137, R23150, R23149, |
| | | | | R23901, R23902, R35690, R39919, R49327, |
| | | | | R49327, H08646, H08645, H52709, H52986, |
| | | | | H67120, H81426, H97481, N20907, N31009, |
| | | | | N51872, N51878, N54463, N76574, W37292, |
| | | | | W37826, AA052963, AA053019, AA053505, |
| | | | | AA129021, AA129020, AA133655, AA133656, |
| | | | | AA130953, AA573417, AA746147, AA879142, |
| | | | | AA938486, D82776, D82683, W23236, C17493 |
| 22 | HSOAJ55 | 221 | 361281 | T90006, R09378, R09379, R12195, T82827, |
| | | | | T84829, R23136, R23137, R23150, R23149, |
| | | | | R23901, R23902, R35690, R39919, R49327, |
| | | | | R49327, H08646, H08645, H52709, H52986, |
| | | | | H67120, H81426, H97481, N20907, N31009, |
| | | | | N51872, N51878, N54463, N76574, W37292, |
| | | | | W37826, AA052963, AA053019, AA053505, |
| | | | | AA129021, AA129020, AA133655, AA133656 |
| 24 | HSXAM05 | 34 | 396445 | H41055, H86278, H86277, N36167, N49355, |
| | | | | N99253, W30680, AA187548 |
| 25 | HSXAS67 | 35 | 396441 | R43052, R46024, R54365, R46024, R59349, |
| | | | | H29581, AA018134, AA128286, AA165397 |
| 26 | HTDAF28 | 36 | 396835 | R32754, R65808 |
| 30 | HTPBW79 | 40 | 581435 | T58875, T69236, R12437, R13448, R37325, |
| | | | | R37361, N52277, W38735, W72124, AA009696, |
| | | | | AA088448, AA181149, AA181148 |
| 30 | HTSEV09 | 223 | 396459 | T54203, T58875, T69236, R37325, R37361, |
| | | | | R72050, N52277, N59026, N72929, W38735, |
| | | | | W72124, W77848, AA009696, AA009415, |
| | | | | AA088448, AA088502, AA181149 |
| 31 | HJPCD40 | 41 | 401227 | R01078, H47562, H58468, N31052, N92318, |
| | | | | N93676, N93667, W24390, W79518, W79405, |
| | | | | W86336, W95427, W95554, AA002106, |
| | | | | AA005054, AA009752, AA009751, AA022648, |
| | | | | AA022637, AA035194, AA143435, AA157417 |
| 33 | HTWCI46 | 43 | 407490 | T71107, R07491, R07544, R02367, R02473, |
| | | | | R12602, R74032, R74123, R79290, R81173, |
| | | | | R81277, R86952, H49320, N54909, AA196897 |
| 34 | HTXGI75 | 44 | 396652 | H11517, H61199, H96603, N24777, N28311, |
| | | | | N28909, N73009, N73300, W02991, W16442, |
| | | | | W23776, W35231, W39312, W79539, W79620, |
| | | | | AA026925, AA026924, AA079258, AA079257, |
| | | | | AA085612, AA112862, AA143350, AA143349, |
| | | | | AA147394, AA147466, AA147465, AA156313 |
| 35 | HWTBF59 | 45 | 740670 | T47527, T47528, T89276, T84349, R00444, |
| | | | | R00445, R50263, R50726, R51643, R62425, |
| | | | | R73541, H05078, H38730, H68907, H68809, |
| | | | | H75646, H75453, H75452, H81932, H82027, |
| | | | | N32427, N36140, N37025, N42766, N44144, |
| | | | | N52649, N56850, N68925, W02115, W03625, |
| | | | | W15447, W20382, W32576, W35117, W39632, |
| | | | | W44562, W47604, W69467, W69551, W73740, |
| | | | | W86128, W86148, W95672, AA024821, |
| | | | | AA024927, AA025859, AA025860, AA046830, |
| | | | | AA046873, AA126258, AA134986, AA135083, |
| | | | | AA150759, AA150682, AA235603, AA236621, |
| | | | | AA236897, AA464236, AA419070, AA419131, |
| | | | | AA428777, AA429067, AA428056 |
| 35 | HWTBF59 | 224 | 361287 | T47528, T89276, R00445, R50726, R51643, |
| | | | | R62425, R73541, H05078, H38730, H68907, |
| | | | | H75646, H75453, H81932, N32427, N36140, |
| | | | | N37025, N52649, N56850, N68925, W02115, |
| | | | | W15447, W20382, W32576, W39632, W44562, |
| | | | | W69551, W73740, W86128, W86148, W95672, |
| | | | | AA024821, AA024927, AA025859, AA025860, |
| | | | | AA046830, AA126258, AA134986, AA135083, |
| | | | | AA150759 |
| 36 | HADAE74 | 46 | 409832 | T46989, T46988, T65134, T65203, R17426, |
| | | | | R23237, R23312, R42660, H60654, H75862, |
| | | | | H75861, N24093, N31388, W56001, W56290, |
| | | | | AA047063, AA047064, AA046111, AA046198, |
| | | | | AA098961, AA098828, AA182785, AA187777, |
| | | | | AA191047 |
| 38 | HATEF60 | 48 | 410124 | T64995, R17261, R41876, R68452, R68454, |
| | | | | H21498, H98622, N25142, N30676, N33908, |
| | | | | N67489, N99057, W30718, AA035240, AA035318, |
| | | | | AA043654, AA043655, AA046927, AA046984, |
| | | | | AA133159, AA133204, AA131580, AA131629, |
| | | | | AA132763, AA132857 |
| 39 | HBMSN25 | 49 | 412010 | R34536, R49053, R85085, R87831, R87846, |
| | | | | AA199833 |
| 40 | HCDAR68 | 50 | 411482 | H24669, AA055330, AA055927 |
| 41 | HCE3J79 | 51 | 409610 | T66611, T81694, R15985, R44533, R50983, |
| | | | | R52279, R52280, R54333, R46724, R44533, |
| | | | | R61702, R63949, R64049, R72902, R73540, |
| | | | | H42845, H43343, H43397, H44022, H44570, |
| | | | | H44569, H59659, H74011, H75604, N53399, |
| | | | | W60971, W61218, AA024497, AA024619, |
| | | | | AA132738, AA173154, AA188369, AA237026 |
| 42 | HMDAN54 | 52 | 411318 | T78112, R19702, R37848, R44258, R44258 |
| 43 | HCECA49 | 53 | 409543 | T48789, T48790, T52689, T52690, T54143, |
| | | | | T57627, T60334, T63169, T64611, T68165, |
| | | | | T73770, R09683, R05784, R05870, R23705, |
| | | | | R24243, R25436, R26263, R26661, R31482, |
| | | | | R33617, R52663, R55790, R64491, R65588, |
| | | | | R66756, R74348, R74447, R77767, R77861, |
| | | | | H24648, H24647, H25483, H30170, H42201, |
| | | | | H61272, H74187, H73366, H84457, H96852, |
| | | | | H97161, N21258, N24067, N25891, N32256, |
| | | | | N35943, N39665, N59887, N74237, N75946, |
| | | | | N77028, N91815, N94382, W16791, W37991, |
| | | | | W42625, W42503, W42504, W45097, W46997, |
| | | | | W47010, W47011, W47035, W58226, W60191, |
| | | | | W74239, AA011342, AA053421, AA053142, |
| | | | | AA069730, AA069687, AA071401, AA079362, |
| | | | | AA088476, AA088867, AA099339, AA098900, |
| | | | | AA099401, AA099509, AA099626, AA100481, |
| | | | | AA111899, AA112344, AA128689, AA130068, |
| | | | | AA130069, AA133988, AA134388, AA130699, |
| | | | | AA131164, AA135908, AA143614, AA148147, |
| | | | | AA151655, AA151855, AA150148, AA152217, |
| | | | | AA150454, AA156656, AA156942, AA158064, |
| | | | | AA158065, AA160927, AA167640, AA173558, |
| | | | | AA173723, AA188571, AA188806, AA190996, |
| | | | | AA191121 |
| 44 | HCEEC15 | 54 | 409527 | R69381,R69382 |
| 45 | HCESF40 | 55 | 616396 | R13472 |
| 45 | HCESF40 | 225 | 411082 | R13472, R37382, H49570, N55573 |
| 46 | HCFMV39 | 56 | 410579 | R91923, R92247 |
| 48 | HCNAP62 | 58 | 411042 | H21798, AA149965 |
| 49 | HCRAF32 | 59 | 409522 | AA194845 |
| 53 | HE2AV74 | 63 | 411019 | R33678, R35656, R37491, R56683, H14646, |
| | | | | H61361, H62387, AA131445, AA131558 |
| 54 | HE2AY71 | 64 | 396403 | T67822, T67974, T73185, T67263, T67264, |
| | | | | T91311, T84892, T85089, R22026, R22079, |
| | | | | R23310, R25617, R31409, R33081, R33171, |
| | | | | R33622, R33733, R48174, R48558, R48654, |
| | | | | R66621, R73320, R73769, R74211, R74309, |
| | | | | R82212, R82268, R82548, H03235, H03847, |
| | | | | H19922, H46963, H46964, H47061, H47135, |
| | | | | R91968, R94507, R94914, R94997, R98001, |
| | | | | R99462, R99463, R99524, R99525, R99727, |
| | | | | H48529, H48701, H53102, H54578, H57772, |
| | | | | H59377, H61224, H61728, H62607, H65068, |
| | | | | H65067, H66144, H66346, H66396, H66561, |
| | | | | H67023, H67024, H67947, H68317, H68316, |
| | | | | H70368, H75943, H78688, H78690, H78771, |
| | | | | H78772, H78871, H79256, H79366, H85283, |
| | | | | H94696, H98582, H98844, H99986, N20645, |
| | | | | N24174, N25213, N26654, N29017, N30434, |
| | | | | N33496, N36055, N39390, N39804, N42325, |
| | | | | N43023, N43S86, N44135, N44905, N55434, |
| | | | | N58351, N58498, N59566, N68659, N72973, |
| | | | | N73562, N74053, N74661, N75286, N76807, |
| | | | | N77719, N78566, N80677, N93248, N93543, |
| | | | | N98928, N98927, W00492, W00999, W01748, |
| | | | | W04563, W04661, W05686, W07160, W07727, |
| | | | | W17036, W20423, W20166, W20366, W21351, |
| | | | | W23644, W31155, W31425, W33072, W35181, |
| | | | | W37772, W37773, W39698, W45053, W45703, |
| | | | | W44350, W46232, W46853, W55895, W55894, |
| | | | | W57879, W57878, W72198, W73477, W73549, |
| | | | | W92689, W94064, W94065, W94685, W95191, |
| | | | | W95291, N89780, N89860, N90540, N91134, |
| | | | | AA026253, AA026254, AA026166, AA029566, |
| | | | | AA034238, AA037765, AA046097, AA053931, |
| | | | | AA062822, AA082444, AA085263, AA085327, |
| | | | | AA128794, AA128795, AA147331, AA191231, |
| | | | | AA195440 |
| 55 | HE2GS36 | 65 | 779386 | N31459, AA027911, AA045421 |
| 55 | HE2GS36 | 226 | 411492 | R41228, H09131, H09953, N25344, N52068, |
| | | | | AA027855, AA045315 |
| 56 | HE2OF09 | 66 | 371407 | N68961, W00660, W46419, W48762, W49781 |
| 57 | HE6EU50 | 67 | 411998 | R10241, R10723, R10745, W86987, AA069424, |
| | | | | AA069425 |
| 58 | HE9HU17 | 68 | 411183 | T50250, R08461, R08467, R14041, R17411, |
| | | | | R33516, R42644, R42644, H01172, H01257, |
| | | | | H12436, H12435, H22405, H22406, H46453, |
| | | | | H46994, H99758, N28477, N39148, N45470, |
| | | | | N46559, N47595, N66302, N70145, N93238, |
| | | | | N98322, N98731, W19310, W25095, W31169, |
| | | | | W44544, W44408, W57885, W57884, W93786, |
| | | | | W93787, W94846, W94847, AA026285, |
| | | | | AA026286, AA059054, AA148611, AA148612, |
| | | | | AA151931, AA160184, AA160185 |
| 60 | HEBBW11 | 70 | 684293 | R12706, R16450, R78468, H04564, H13151, |
| | | | | H19832, H19862, H79071, N30846, N92451, |
| | | | | W20305, W31335, W87448, W87547, N90683, |
| | | | | AA055051, AA055130, AA101604, AA101605, |
| | | | | AA262932, AA425185 |
| 60 | HEBBW11 | 227 | 396426 | R12706, R78468, H04564, H13151, H19832, |
| | | | | H19862, H79071, N30846, N30852, N41379, |
| | | | | N92451, W20305, W87448, W87547, N90683, |
| | | | | AA044232, AA044371, AA055051, AA101604, |
| | | | | AA101605 |
| 61 | HELDY74 | 71 | 410281 | T66450, R15824, R51635, W72803 |
| 62 | HEMAE80 | 72 | 409495 | T71556, T90634, T82005, T83161, H57113, |
| | | | | H61567, AA233071 |
| 63 | HFEBA88 | 73 | 411999 | T97504, R01753, H52246, N26214, N50118, |
| | | | | N64701, N94589, W23796, W60801, W60932, |
| | | | | AA004342, AA063605 |
| 64 | HFGAB89 | 74 | 408358 | T89093, R60840, H16750, H51569, H51939 |
| 65 | HFVHY45 | 75 | 410115 | N68821 |
| 67 | HGBBQ69 | 77 | 409617 | R05775, R05861, R79705, R79706, H14866, |
| | | | | H17904, H39588, H40018, H64593, H64594, |
| | | | | H64595, H64596, H64613, H64614, H64628, |
| | | | | H65957, H65958, H65968, H65967, H66164, |
| | | | | H66165, H66166, H66167, H66172, H66173, |
| | | | | H66188, H66189, N22434, N59533, N62574, |
| | | | | N78274, W61276, W61277, W94640, W92528, |
| | | | | AA011621, AA011622, AA040070, AA040101 |
| 70 | HHFHR32 | 80 | 411470 | R14689, H04469, H04548, H53694, N26986, |
| | | | | N40108, N62880, N79387, W49508, W49509, |
| | | | | W55970, W63587, W67453, AA232777, |
| | | | | AA233859 |
| 71 | HHGCN69 | 81 | 409956 | R71890, R71889, H37817, H37868, N66068, |
| | | | | N95661 |
| 72 | HHGDO13 | 82 | 410173 | R25955, R36307, R49238, R49238, H03251, |
| | | | | H03252, H18871, H18870, H48152, H49465, |
| | | | | H49464, H49937, H49940, H85293, N26655, |
| | | | | N27044, N29702, N39238, N46682, N51027, |
| | | | | N51035, N51042, N56710, N73444, N95391, |
| | | | | W25227, W32932, W35368, W68062, W68063, |
| | | | | W73332, W73353, W93595, W95726, W95769, |
| | | | | AA025052, AA025053, AA032241, AA033649, |
| | | | | AA151421, AA151422, AA179342, AA179574, |
| | | | | AA180170, AA180169, AA186911 |
| 73 | HHPFD63 | 83 | 410143 | T75205, R45275, R51873, R54265, R45275, |
| | | | | H14061, H14062, H14273, H17115, H17220, |
| | | | | H18846, H18847, R85199, R87978, R90826, |
| | | | | W73916, W77979, AA169431 |
| 76 | HKIXL73 | 86 | 410511 | H19088, H20031, H20111, H46758, H46843, |
| | | | | H87138, W70265, W75969 |
| 80 | HNFAE54 | 90 | 408120 | AA026479, AA081127, AA081152 |
| 87 | HOGAR52 | 97 | 410161 | T81323, T81852, R01268, R01382, H27407, |
| | | | | H28601, H79267, H79378, N58730, N62405, |
| | | | | N71255, N72641, W01562, AA044699, AA055259, |
| | | | | AA055258, AA082848, AA086241, AA088679, |
| | | | | AA112191, AA156048, AA157459, AA204677 |
| 88 | HOSBZ55 | 98 | 410145 | R70745, H20568 |
| 89 | HOSDI92 | 99 | 617570 | R94013, H84608, H98837, N33140, W02553, |
| | | | | AA004952, AA429052 |
| 89 | HOSDI92 | 230 | 410140 | T75079, R94013, H84608, H98837, N33140, |
| | | | | N92104, W02553, AA004952, AA004951 |
| 91 | HPCAL49 | 101 | 411321 | N66498 |
| 92 | HPFCR13 | 231 | 371352 | R00702, R00703, R79938, R80028, N75501, |
| | | | | N99910, W05126, W25289 |
| 93 | HOFNZ45 | 103 | 607449 | T51015, T51107, T59404, T59450, T89720, |
| | | | | T93308, T67002, R00844, H40516, H43373, |
| | | | | H43387, H96409, H99093, N47247, N47248, |
| | | | | N53526, N62173, W94497, AA029586, AA043434, |
| | | | | AA043435, AA188515 |
| 93 | HPHAC83 | 232 | 411468 | T51015, T51107, T55000, T55166, T57093, |
| | | | | T57163, T59404, T59450, T69888, T70216, |
| | | | | T89720, T89817, T93308, T93985, T67002, |
| | | | | T67003, R00844, R01497, R74457, R74556, |
| | | | | H02934, H04237, H05269, H27375, H27811, |
| | | | | H40516, H38091, H43373, H43387, H44626, |
| | | | | H46401, R92096, R95179, R95671, R97192, |
| | | | | R97193, H50947, H86131, H86438, H96047, |
| | | | | H96409, H99093, N20096, N22174, N22574, |
| | | | | N22684, N23774, N24145, N26964, N27840, |
| | | | | N27867, N27902, N29227, N29232, N29808, |
| | | | | N31162, N36009, N36131, N40614, N40642, |
| | | | | N44138, N44243, N47247, N47248, N51254, |
| | | | | N53526, N53972, N59053, N62173, N67339, |
| | | | | N67385, N71220, N75793, N79303, N91802, |
| | | | | W04949, W31236, W47342, W52023, W57583, |
| | | | | W68144, W68471, W74547, W74488, W79753, |
| | | | | W80606, W80607, W94497, W94496, AA013048, |
| | | | | AA013341, AA029585, AA029586, AA039227, |
| | | | | AA043434, AA043435, AA047188, AA064949, |
| | | | | AA064950, AA076086, AA076183, AA125863, |
| | | | | AA125862, AA128872, AA134540, AA148819, |
| | | | | AA150288, AA150419, AA167118, AA173560, |
| | | | | AA173724, AA186892, AA188515, AA232090, |
| | | | | AA235715 |
| 94 | HPMBQ32 | 104 | 410014 | R50088, N75569 |
| 95 | HPWAN23 | 233 | 411353 | R11595, R18735, H03839, H03838, H09030, |
| | | | | AA114200, AA147186, AA147297 |
| 96 | HRDFB85 | 106 | 411020 | R12121, T96099, R05961, R05962, R36883, |
| | | | | R48403, R50075, R50076, H13937, H27324, |
| | | | | H27350, H44304, H93341, H93844, N72688, |
| | | | | W02467, W21446, W74492, W79089, AA149303, |
| | | | | AA149402, AA149417, AA149738, AA157596, |
| | | | | AA157892 |
| 97 | HRGBR28 | 107 | 410144 | T74132, R19091, H16341, H16424, R87393, |
| | | | | W74106, AA120808, AA160124 |
| 98 | HSKGN81 | 234 | 409905 | T64523, T65948, T74373, R12726, R17501, |
| | | | | R27706, R42595, R42595, AA031630, AA082483, |
| | | | | AA100891, AA135290, AA234325 |
| 99 | HSPAH56 | 109 | 411538 | R10761, R46703, R46703, N51835, AA115766, |
| | | | | AA127238, AA156859 |
| 100 | HE8EU04 | 110 | 686925 | T59099, T89118, T89207, T98083, R06017, |
| | | | | H43963, H43962, N27605, N31860, N42656, |
| | | | | N48371, N81110, W01192, W24031, W31758, |
| | | | | W69603, W79669, AA227693, AA227676, |
| | | | | AA262822 |
| 100 | HSXBT86 | 235 | 410177 | T59099, T89116, T89118, T89205, T89207, |
| | | | | T98005, T98083, R06017, H01422, H28038, |
| | | | | H39525, H43963, H43962, N22985, N23959, |
| | | | | N31597, N31860, N32689, N38734, N40651, |
| | | | | N42656, N48371, N53027, N62930, N81110, |
| | | | | N98486, W01192, W16833, W24031, W24259, |
| | | | | W31758, W52828, W69414, W69603, W72795, |
| | | | | W74131, W76117, W78992, W79669, W80618, |
| | | | | W93298, W92848, AA027834, AA027877, |
| | | | | AA065180, AA065181, AA156606, AA156909, |
| | | | | AA173551, AA173717, AA173998, AA176694, |
| | | | | AA227693, AA227676, AA235938, AA236953 |
| 101 | HSXCS62 | 111 | 410342 | R14929, R35412, R41243, R49209, R41243, |
| | | | | R49209, H09440, H24724, H24725, H25649, |
| | | | | H25822, H41130, H45960, H46504, H47042, |
| | | | | R84480, R85875, R89720, R89721, H56511, |
| | | | | N28648, N31600, N34149, N36302, N42659, |
| | | | | W32884, W35153, AA135837, AA135998 |
| 102 | HTEFU09 | 112 | 410283 | T53177, T98847, R20208, R47997, R48112, |
| | | | | R53403, R53996, R74086, R74085, H52255, |
| | | | | H58876, N24921, N33797, N41673, N69460, |
| | | | | N70571, W04529, W20201, W31409, W85735, |
| | | | | W85802, W95123, W95240, N90952, AA016215, |
| | | | | AA021506, AA025099, AA025188, AA037648, |
| | | | | AA037649, AA053008, AA160015, AA188552 |
| 105 | HTGEW91 | 115 | 411467 | T75409, R12833, R20743, R51579, R51668, |
| | | | | R20743, R70022, R70067, H13081, H13285, |
| | | | | H20181, H20372, H94368, N24535, N24564, |
| | | | | N25423, N25546, N33976, N34007, N34115, |
| | | | | N34143, AA082676, AA128130, AA125885, |
| | | | | AA150041, AA150157, AA167115, AA167271, |
| | | | | AA188416, AA188618, AA188719, AA188737, |
| | | | | AA194567, AA227181, AA236511 |
| 106 | HTOEY16 | 116 | 411419 | T77313, R18801, R43911, R43911, R78272, |
| | | | | R78273, H99299, H99300, N25845, N36152, |
| | | | | N36173, N44152, N44162, W02226, W32550, |
| | | | | AA057265, AA058710, AA085565, AA182006, |
| | | | | AA235467 |
| 108 | HTSGM54 | 118 | 792952 | T57851, T82405, R10508, T81626, R14860, |
| | | | | N64170, AA114906, AA114905, AA233797, |
| | | | | AA233828 |
| 108 | HTSGM54 | 236 | 411477 | T57851, T82405, R10508, T81626, R14860, |
| | | | | N64170, AA114906, AA114905, AA233797, |
| | | | | AA233828 |
| 109 | HTSHE40 | 119 | 411287 | R49564, R49564, H72036, W90622 |
| 111 | HTWBY29 | 121 | 410175 | T59381, R19528, R43882, R43882, R55664, |
| | | | | R55665, H17451, H17555, R88491, R90802, |
| | | | | R90803, AA019030, AA021487, AA080905, |
| | | | | AA084339 |
| 112 | HUKFC71 | 122 | 410328 | H40724, H46968, N42261, W31201, W31772, |
| | | | | W74161, AA078878, AA147783, AA155778 |
| 113 | HCE3Q10 | 123 | 412333 | R12129, R15338, R36062, H08308, H14720, |
| | | | | H40798, H38530, R88252, R88963, N45514 |
| 114 | HCEVR60 | 124 | 414534 | T94052, R63094, R63141, W72684, W73520, |
| | | | | W73503, W77790, AA075563, AA075558 |
| 115 | HDTAW95 | 125 | 412472 | R46762, R46857 |
| 117 | HELBU29 | 127 | 414535 | H18640, N66514, N98666, AA224105, |
| | | | | AA232976, AA233279, AA256848, AA256892, |
| | | | | AA256170, AA256228, AA256376, AA256436 |
| 120 | HHPTD20 | 130 | 371716 | H04828 |
| 121 | HIBED17 | 131 | 412488 | R50692, R70201, R70202, R73362, H05522, |
| | | | | H10062, H10116, H12934, H68642, H68643, |
| | | | | N22739, W60865, W60941, W81135, W81134, |
| | | | | AA029699, AA029640, AA056576, AA056680, |
| | | | | AA129131 |
| 123 | HOABL56 | 133 | 413244 | R79757, R79756, R92799, R95927, H54516, |
| | | | | H83042, N20295, N26162, N27565, N55348, |
| | | | | N62316, N77354, N79565, W16550, AA017055 |
| 124 | HPMCJ92 | 134 | 399492 | R77437, R77527, H01511, H01617 |
| 128 | HUKC064 | 138 | 413200 | T90943, T79172, T79255, T84324, T85824, |
| | | | | T95309, T95390, T99391, R30896, R60293, |
| | | | | H58319, H58709, H72088, H72189, H73940, |
| | | | | H79782, H79816, H79875, H79910, AA043890, |
| | | | | AA045424, AA171926 |
| 129 | H6EAA53 | 139 | 103314 | T71026, T71027, T71089, T74115, T74491, |
| | | | | T92559, T92631, R31026, R31516, R36638, |
| | | | | R47741, R50388, R56704, R79276, R82645, |
| | | | | H15896, H16001, H19629, H19628, H19840, |
| | | | | H21086, H21123, H21218, H24606, H25286, |
| | | | | H25326, H30481, H41893, H41894, H37793, |
| | | | | H45153, H45281, H45351, R94255, R94615 |
| 132 | HALSK07 | 142 | 418461 | T82404, R24457, N51926, N53706, AA136333, |
| | | | | AA136419 |
| 133 | HALSQ59 | 143 | 396185 | AA075298 |
| 134 | HAIBP89 | 144 | 727543 | T69855, R08029, R08078, H08338, H08339, |
| | | | | H24045, H24152, H42902, H42973, H58361, |
| | | | | H58750, H80028, H94211, N70685, N99825, |
| | | | | W42711, W42904, W57667, W60487, W60773, |
| | | | | AA009753, AA135410, AA135816, AA258159, |
| | | | | AA258978 |
| 134 | HBGCB91 | 237 | 371337 | T69855, R08029, R08078, H08339, H24045, |
| | | | | H42902, H42973, H58361, H58750, H80028, |
| | | | | H94211, N70685, N99825, W42711, W42904, |
| | | | | W57667, W60487, W60773, AA009753, |
| | | | | AA135410 |
| 135 | HBMTD81 | 145 | 410544 | R21916, R22565, R99043, AA046203, AA046283, |
| | | | | AA055141, AA173411, AA173467 |
| 136 | HBXGK12 | 146 | 415649 | T55067, R05951, R76538, R76945, R77034, |
| | | | | R79544, R79545, H00668, H61203, H62107, |
| | | | | N74280, N77879, W04380, W05836, W07303, |
| | | | | AA026385, AA026375, AA047358, AA055622, |
| | | | | AA112556, AA159861, AA255749 |
| 137 | HFKFJ07 | 147 | 423130 | AA152460 |
| 138 | HCQAI40 | 148 | 411145 | T95631, AA005342, AA004292, AA022666, |
| | | | | AA022765 |
| 140 | HE2GT20 | 150 | 417775 | T72619, T72689, T74301, T89024, R01020, |
| | | | | R44223, R46604, R20552, R44223, R46604, |
| | | | | R55652, R55653, R60269, R60438, R60778, |
| | | | | R60894, R61011, H06398, H29570, H29654, |
| | | | | H41952, R86174, H53090, H56625, H85047, |
| | | | | H84669, N50431, N50486, N56905, W07007, |
| | | | | W15546, W31640, W38829, W39109, W58292, |
| | | | | W78841, W80740, W85716, W85754, W88634, |
| | | | | AA004849, AA022908, AA035337, AA039955, |
| | | | | AA040024, AA114936, AA181025, AA186533 |
| 141 | HE8EY43 | 151 | 407475 | R74382, R74394, H24509, H89226, N22621, |
| | | | | W37881, W37943, W76005, AA215347 |
| 142 | HFCEB37 | 152 | 411345 | H06701 |
| 143 | HFTCT67 | 153 | 412026 | H40744, N94366, AA187325, AA188450 |
| 144 | HGLAM46 | 154 | 408366 | T49176, T49177, R23545, R44296, R48547, |
| | | | | R48636, R44296, R70950, R71001, R77003, |
| | | | | H01174, H01262, H04151, H04152, H40131, |
| | | | | R98874, R98963, H58076, H58099, H59475, |
| | | | | H61466, H65722, H65723, H74292, H74293, |
| | | | | H83754, H83896, H91603, H91602, H93008, |
| | | | | H94999, H98174, H99350, N20932, N21320, |
| | | | | N22996, N23788, N24183, N24199, N24913, |
| | | | | N26462, N27800, N28582, N31255, N31663, |
| | | | | N31686, N32064, N32421, N32703, N36039, |
| | | | | N41352, N42221, N45375, N56843, N70498, |
| | | | | N70787, N93093, W01403, W24405, W40392, |
| | | | | W45383, W4S824, W51970, W72864, W75959, |
| | | | | W78937, W85704, W86916, AA011569, |
| | | | | AA036893, AA127482, AA127481, AA146840, |
| | | | | AA146841, AA150457, AA156659, AA159754, |
| | | | | AA159753, AA171950, AA172157, AA179486, |
| | | | | AA179508, AA179528, AA179539, AA190735, |
| | | | | AA196875 |
| 145 | HHGBR15 | 155 | 214364 | R39009, R41924, R41924, R59390, N22125, |
| | | | | N68556, AA036728 |
| 146 | HJAAU36 | 156 | 414157 | T39986, T93486, T96316, T67465, T69498, |
| | | | | T72660, T72729, T86380, T86281, T98445, |
| | | | | T98500, T99806, T99911, R79809, R79909, |
| | | | | H26813, H27797, H28014, H28191, H28234, |
| | | | | R83661, R83660, R83673, R83674, R83685, |
| | | | | R83686, R86297, R86296, R86312, R86311, |
| | | | | H51032, H51031, H52549, H60248, H80916, |
| | | | | H88268, H88269, N62947, N63163, N79850, |
| | | | | W20040, W72762, W74448, N91378, AA102584, |
| | | | | AA232099, AA232534, AA232806, AA233861, |
| | | | | AA235866, AA236068 |
| 147 | HUSIT49 | 157 | 421065 | T66884, R54992, R55445, H19850, H21231, |
| | | | | H22646, H22647, H27769, H27834, H42917, |
| | | | | H42918, H43624, H44676, R88710, R90960, |
| | | | | R92816, R96930, R96986, R98590, R98589, |
| | | | | H60171, H95774, H96129, N54424, N58406, |
| | | | | AA129135, AA129134, AA176131, AA195034, |
| | | | | AA262891 |
| 148 | HKLAB16 | 158 | 419037 | R02500, R32757, R37842, R70640, R82407, |
| | | | | W32933, W35369, N90561, AA026880, |
| | | | | AA057127, AA057193 |
| 149 | HLMMU76 | 159 | 413374 | T59668, T59802, W73105, AA160748 |
| 150 | HMSKQ35 | 160 | 415560 | R53057, H82270, N51427, AA021420, AA026971, |
| | | | | AA026972 |
| 154 | HOECU83 | 164 | 831917 | R34106, R34105, AA166983, AA224458, |
| | | | | AA531249, AA588629, C21057 |
| 154 | HOECU83 | 238 | 419012 | R34106, R34105, AA224458 |
| 155 | HPTRC15 | 165 | 418375 | T90946, T85832, R15053, R60917, R61036, |
| | | | | R68361, H05094, H05556, H06465, H10224, |
| | | | | H10280, H10972, H10973, H22893, N28604, |
| | | | | AA011623, AA011624, AA016231, AA026059, |
| | | | | AA166886 |
| 156 | HSKCP69 | 166 | 702021 | R09234, R09346, R06914, R06965, H68486, |
| | | | | H75419, N67047, W00859, AA029670, AA044243, |
| | | | | AA044324, AA148822, AA150422 |
| 156 | HSKCP69 | 239 | 413210 | R09234, R09346, R06914, R06965, H68486, |
| | | | | H75419, N67047, W00859, AA029670, AA044243, |
| | | | | AA044324, AA148822, AA150422 |
| 157 | H6EAE26 | 167 | 422804 | AA182585, AA243086 |
| 160 | HAICP19 | 170 | 422672 | T39496, T49219, T49220, N31961, N31991, |
| | | | | W04672, W31773, AA120830, AA120831 |
| 161 | HAUAE83 | 171 | 422695 | T47437, T47436, T47523, T48820, T48821, |
| | | | | T53678, T53679, T54444, T54498, T60151, |
| | | | | T60211, T63582, T64428, T65689, T65699, |
| | | | | T92720, T92800, T74745, T90117, T82456, |
| | | | | T82942, T83431, T84078, R19785, R23160, |
| | | | | R24260, R24366, R33337, R35278, R36040, |
| | | | | R36975, R49121, R50949, R52419, R53809, |
| | | | | R53853, R49121, R56655, R56823, R58965, |
| | | | | R59021, R63366, R63415, R64167, R64282, |
| | | | | R66836, R66884, R67802, R67803, R67933, |
| | | | | R67969, R75720, R78064, R80262, R80377, |
| | | | | R81338, R81590, H01186, H01282, H08184, |
| | | | | H08284, H08404, H08405, H29026, H45836, |
| | | | | R97102, R97149, H50658, H50748, H56041, |
| | | | | H56118, H65070, H68501, H70503, H88218, |
| | | | | H88217, H93598, H93618, N20946, N23947, |
| | | | | N27815, N31848, N40220, N51513, N53182, |
| | | | | N66179, N66807, N66808, N69755, N98422, |
| | | | | N99170, W03608, W38501, W39785, W45318, |
| | | | | W46310, W46309, W47477, W47478, W58724, |
| | | | | W60790, W60789, W84314, W84341, W94553, |
| | | | | W92626, AA022581, AA022582, AA026348, |
| | | | | AA026576, AA027051, AA033709, AA034334, |
| | | | | AA046827, AA046826, AA045549, AA045550, |
| | | | | AA127720, AA127775, AA143073, AA143133, |
| | | | | AA150844, AA151016, AA192781, AA192782 |
| 163 | HBMTY28 | 173 | 422688 | T54996, T55162, T81957, H40448, H40449, |
| | | | | R96511, R96556, H59080, H60352, N58089, |
| | | | | N76050, W04455, AA005161, AA004218, |
| | | | | AA011395, AA011432, AA116050 |
| 164 | HBMVP04 | 174 | 812281 | H82435, H82698, N53899, W04955 |
| 164 | HBMVP04 | 241 | 419854 | H82435, H82698, N53899, W04955 |
| 165 | HCDDB78 | 175 | 422696 | T80138, R05721, R05722, R40720, R51388, |
| | | | | R40720, R60772, H77587, H91710, H91811, |
| | | | | N52332, N62896, N75102, W01336, W24829, |
| | | | | W56236, W78702, W80502, AA031936, |
| | | | | AA031937, AA034077, AA046609, AA046724, |
| | | | | AA129906, AA129905, AA133809, AA150149, |
| | | | | AA152218, AA235941, AA236885 |
| 167 | HCEZS40 | 177 | 422714 | R12037, R18992, R44878, R44878, H56172, |
| | | | | H56388, H58079, H79475, H97586, N20466, |
| | | | | N25493, N28755, N50120, N62820, W01355, |
| | | | | W74545, W74486, W93543, AA128184, |
| | | | | AA126379 |
| 168 | HCFNF11 | 178 | 422712 | H80152, AA010492, AA167414, AA167418, |
| | | | | AA167415, AA167426, AA167425, AA167419, |
| | | | | AA171736, AA172019 |
| 169 | HCRBL20 | 179 | 744946 | T89241, H88386, H88454, H88386, N46536, |
| | | | | N63060, W93935, W93936, AA075562, |
| | | | | AA075557, AA180173, AA180147, AA194932, |
| | | | | AA194931, AA194884, AA195588, AA213530, |
| | | | | AA243504, AA243357, AA422037 |
| 169 | HCRBL20 | 242 | 422383 | T89241, H88386, H88454, H88386, N46536, |
| | | | | N63060, W93935, W93936, AA075562, |
| | | | | AA075557, AA180147, AA194932, AA194931, |
| | | | | AA194884, AA195588, AA213530, AA243504, |
| | | | | AA243357 |
| 171 | HDSAP81 | 181 | 422719 | N39609, AA011604 |
| 172 | HE2CT29 | 182 | 420020 | N74326 |
| 173 | HE8MG65 | 243 | 422740 | T56650, T57256, T63714, T73914, T73938, |
| | | | | T73946, T73970, T77203, R22170, R22171, |
| | | | | R24271, R24380, R27064, R27990, R28253, |
| | | | | R28546, R33988, R39548, R60886, R66279, |
| | | | | R66278, R67307, R71201, R71202, H02943, |
| | | | | H03083, H03084, H04243, H04760, H04851, |
| | | | | H06938, H06939, R84922, R91805, R91804, |
| | | | | R93954, R93953, R94083, R94129, H52707, |
| | | | | H69823, H69832, H84985, H87352, H87893, |
| | | | | H94285, N24258, N26510, N31711, N33488, |
| | | | | N35085, N35563, N42365, N43879, N53729, |
| | | | | N67539, N73915, N77452, N78653, W45116, |
| | | | | W78900, W84673, AA015592, AA018305, |
| | | | | AA018631, AA018727, AA019837, AA022837, |
| | | | | AA022960, AA039983, AA040630, AA156047 |
| 174 | HE9FB42 | 184 | 828253 | T71135, T81630, T82274, T83563, R66636, |
| | | | | H04574, H18490, N46661, N47628, N52212, |
| | | | | N53127, N53634, N62209, N66750, N76507, |
| | | | | N79940, W73330, W84546, AA149684, |
| | | | | AA164834, AA164833, AA171498, AA171599, |
| | | | | AA187239, AA187687, AA187903, AA186756, |
| | | | | AA227149, AA227342, AA233128, AA233262, |
| | | | | AA233728, AA258430, AA259060, X93861, |
| | | | | AA603886, AA568710, AA639952, AA974278, |
| | | | | W26196, W84460, C20754, AA090438, AA094076 |
| 174 | HE9FB42 | 244 | 420024 | T71135, T81630, T82274, T83563, N46661, |
| | | | | W73330, AA149684, AA164833, AA171599, |
| | | | | AA187239, AA187903, AA186756, AA227149, |
| | | | | AA227342 |
| 175 | HEMAM41 | 185 | 741647 | R40658, R40658, N62855 |
| 175 | HEMAM41 | 245 | 419870 | R40658, R40658, N62855 |
| 176 | HEMCV19 | 186 | 423219 | R39576, R39644, R55519, R55520, H25585, |
| | | | | H25630, H42497, H43485, R95168, H73675, |
| | | | | H73419, H80718, H80719, W95391, W95348, |
| | | | | AA034079, AA044081, AA187305, AA187096 |
| 178 | HETAR54 | 188 | 422765 | R22877, R78124, H86507, N34893, N95529, |
| | | | | W20289, W24342, W32533, W32670, N90669, |
| | | | | AA019416, AA019318, AA026402, AA027311, |
| | | | | AA037586, AA054647, AA252682 |
| 179 | HETBX14 | 189 | 806447 | W60282 |
| 179 | HETBX14 | 247 | 422659 | W60282 |
| 180 | HFGAB48 | 190 | 422777 | R42520, R42520, N64660, N80095 |
| 181 | HFKFI40 | 191 | 423226 | T47877, T47937, T51505, T75501, T89199, |
| | | | | T85240, T85406, R20055, R28467, R31273, |
| | | | | R31879, R76266, H03224, H04016, H16963, |
| | | | | H30109, N53759, N58780, N62962, N77467, |
| | | | | N79865, N81078, W07419, W57548, W68669, |
| | | | | W68772 |
| 182 | HFXHN68 | 192 | 422549 | T87904, T87997, R10903, R10955, H64853, |
| | | | | N63499, N74353, N74407, N94712, W02620, |
| | | | | W03115 |
| 183 | HGBFO79 | 193 | 422794 | T74861, R54514, R76898, R77063, R79667, |
| | | | | R79856, R84453, R98071, H54089, W40292, |
| | | | | W46517, W88866, AA203205 |
| 184 | HGLAM56 | 194 | 423223 | AA256641, AA256642 |
| 187 | HHPSD37 | 197 | 422805 | R44397, R44397, N32549, N41894, AA085999 |
| 188 | HHPSF70 | 198 | 422809 | R26136, H08855, H41065, H55993, H80007, |
| | | | | H83746, H83889, H88534, H88580, H89097, |
| | | | | H89200, N22006, N45466, N45508, N51670, |
| | | | | N51854, N54118, N62627, N71208, N78398, |
| | | | | AA018235, AA019116, AA131865, AA131952, |
| | | | | AA148774, AA148523 |
| 189 | HHSAK25 | 199 | 422813 | T92909, T93001, T95997, R61024, H19116, |
| | | | | H24430, H24459, R94331, H67161, H68562, |
| | | | | H73892, H73918, H74085, H74110, H78993, |
| | | | | H81466, H81767, H81766, H82583, H91720, |
| | | | | H91821, H99152, N20388, N22843, N24401, |
| | | | | N24496, N25453, N28651, N35075, N36359, |
| | | | | N43815, W92746, W92869, AA057815 |
| 190 | HIASB53 | 200 | 422811 | T68050, R97204, N42257, AA046836, AA047007, |
| | | | | AA157267, AA157180, AA186993, AA188308, |
| | | | | AA196715 |
| 191 | HJABZ65 | 201 | 419857 | N75833, N78710, N91897, W44720, W44764, |
| | | | | N90606, AA135838 |
| 192 | HJPBB39 | 202 | 422649 | T66427, R15801, R14623, R33639, R45609, |
| | | | | R51011, R51118, R45609, R66101, R67704, |
| | | | | H17989, H17990, N94819, W17083, W67749, |
| | | | | W68029, W74094, W79385, W94890, W92054, |
| | | | | AA007307, AA007469, AA054550, AA054558, |
| | | | | AA054610, AA054618, AA054521 |
| 193 | HLHSK94 | 203 | 422828 | R55809, H83295, N92239, W37154, W38638, |
| | | | | N90902, AA017680, AA040604, AA040705 |
| 194 | HLHTC70 | 204 | 422829 | R61522, H08810 |
| 196 | HLTCY93 | 206 | 422848 | T50389, T50520, T55419, T55495, T55974, |
| | | | | T57220, R34591, R34592, R69726, H21148, |
| | | | | R85777, R99233, H61311, H62351, H85185, |
| | | | | H88299, N23288, N32662, AA005068, AA007333, |
| | | | | AA007334, AA036884, AA044715, AA044907, |
| | | | | AA045458, AA046500, AA045654, AA115936, |
| | | | | AA126775, AA133605, AA133606, AA133980, |
| | | | | AA181633, AA182611 |
| 197 | HLTDB65 | 207 | 419864 | T88814, T78480, T78565, T84197, T96608, |
| | | | | T96718, T96898, T96899, R01674, R02614, |
| | | | | R62952, R63004, H01169, H01254, H40397, |
| | | | | H53915, H54535, H86324, N23958, N28602, |
| | | | | N31859, W17062, W40144, W49624, N89648, |
| | | | | AA019070, AA019151, AA134914, AA136931, |
| | | | | AA137028, AA148976, AA148977, AA196164, |
| | | | | AA196293 |
| 199 | HMSHQ24 | 209 | 422565 | R16159, R55052, R59723, R72647, H60244, |
| | | | | N33957, N79519, N79654, AA032239, AA033647, |
| | | | | AA156948 |
| 200 | HNFAH08 | 210 | 420031 | R62825, H69909, H69910, H69910, N25612, |
| | | | | N34210, AA056610, AA251839, AA251814 |
| 205 | HOSFM22 | 215 | 412025 | T90315, T90402, R23872, R30787, R76172, |
| | | | | R77141, R80565, H00726, H01049, H01153, |
| | | | | H04603, H04630, H12817, H79113, H82795, |
| | | | | H95178, N42743, N68145, N75220, N94419, |
| | | | | N98917, W19432, W30766, W31142, W46805, |
| | | | | W46923, W48861, W79735, W92123, AA046579, |
| | | | | AA046665, AA046966, AA057191, AA127892, |
| | | | | AA129011, AA136002, AA136874, AA136903, |
| | | | | AA152237, AA152204, AA199930, AA203584 |
| 206 | HPHAC88 | 216 | 411423 | R19567, R35876, R35877, R48573, R48673, |
| | | | | H41417, R85943 |
| 207 | HCDEO95 | 217 | 371706 | H69632, H70475, N66605, AA026327 |

[2268] Having generally described the invention, the same will be more readily understood by reference to the following examples, which are provided by way of illustration and are not intended as limiting.

### EXAMPLES

### Example 1

### Isolation of a Selected cDNA Clone from the Deposited Sample

[2269] Each cDNA clone in a cited ATCC deposit is contained in a plasmid vector. Table 1 identifies the vectors used to construct the cDNA library from which each clone was isolated. In many cases, the vector used to construct the library is a phage vector from which a plasmid has been excised. The table immediately below correlates the related plasmid for each phage vector used in constructing the cDNA library. For example, where a particular clone is identified in Table 1 as being isolated in the vector “Lambda Zap,” the corresponding deposited clone is in “pBluescript.”

| Vector Used to Construct Library | Corresponding Deposited Plasmid |
|---|---|
| Lambda Zap | pBluescript (pBS) |
| Uni-Zap XR | pBluescript (pBS) |
| Zap Express | pBK |
| Iafmid BA | plafmid BA |
| pSport1 | pSport1 |
| pCMVSport 2.0 | pCMVSport 2.0 |
| pCMVSport 3.0 | pCMVSport 3.0 |
| pCR ®2.1 | pCR ®2.1 |

[2270] Vectors Lambda Zap (U.S. Pat. Nos. 5,128,256 and 5,286,636), Uni-Zap XR (U.S. Pat. Nos. 5,128,256 and 5,286,636), Zap Express (U.S. Pat. Nos. 5,128,256 and 5,286,636), pBluescript (pBS) (Short, J. M. et al., Nucleic Acids Res. 16:7583-7600 (1988); Alting-Mees, M. A. and Short, J. M., Nucleic Acids Res. 17:9494 (1989)) and pBK (Alting-Mees, M. A. et al., Strategies 5:58-61 (1992)) are commercially available from Stratagene Cloning Systems, Inc., 11011 N. Torrey Pines Road, La Jolla, Calif., 92037. pBS contains an ampicillin resistance gene and pBK contains a neomycin resistance gene. Both can be transformed into E. coli strain XL-1 Blue, also available from Stratagene. pBS comes in 4 forms SK+, SK−, KS+ and KS. The S and K refers to the orientation of the polylinker to the T7 and T3 primer sequences which flank the polylinker region (“S” is for SacI and “K” is for KpnI which are the first sites on each respective end of the linker). “+” or “−” refer to the orientation of the f1 origin of replication (“ori”), such that in one orientation, single stranded rescue initiated from the f1 ori generates sense strand DNA and in the other, antisense.

[2271] Vectors pSport1, pCMVSport 2.0 and pCMVSport 3.0, were obtained from Life Technologies, Inc., P.O. Box 6009, Gaithersburg, Md. 20897. All Sport vectors contain an ampicillin resistance gene and may be transformed into E. coli strain DH10B, also available from Life Technologies. (See, for instance, Gruber, C. E., et al., Focus 15:59 (1993).) Vector lafmid BA (Bento Soares, Columbia University, NY) contains an ampicillin resistance gene and can be transformed into E. coli strain XL-1 Blue. Vector pCR®2.1, which is available from Invitrogen, 1606 Faraday Avenue, Carlsbad, Calif. 92008, contains an ampicillin resistance gene and may be transformed into E. coli strain DH10B, available from Life Technologies. (See, for instance, Clark, J. M., Nuc. Acids Res. 16:9677-9686 (1988) and Mead, D. et al., Bio/Technology 9: (1991).) Preferably, a polynucleotide of the present invention does not comprise the phage vector sequences identified for the particular clone in Table 1, as well as the corresponding plasmid vector sequences designated above.

[2272] The deposited material in the sample assigned the ATCC Deposit Number cited in Table 1 for any given cDNA clone also may contain one or more additional plasmids, each comprising a cDNA clone different from that given clone. Thus, deposits sharing the same ATCC Deposit Number contain at least a plasmid for each cDNA clone identified in Table 1. Typically, each ATCC deposit sample cited in Table 1 comprises a mixture of approximately equal amounts (by weight) of about 50 plasmid DNAs, each containing a different cDNA clone; but such a deposit sample may include plasmids for more or less than 50 cDNA clones, up to about 500 cDNA clones.

[2273] Two approaches can be used to isolate a particular clone from the deposited sample of plasmid DNAs cited for that clone in Table 1. First, a plasmid is directly isolated by screening the clones using a polynucleotide probe corresponding to SEQ ID NO:X.

[2274] Particularly, a specific polynucleotide with 30-40 nucleotides is synthesized using an Applied Biosystems DNA synthesizer according to the sequence reported.

[2275] The oligonucleotide is labeled, for instance, with ³²P-γ-ATP using T4 polynucleotide kinase and purified according to routine methods. (E.g., Maniatis et al., Molecular Cloning: A Laboratory Manual, Cold Spring Harbor Press, Cold Spring, N.Y. (1982).) The plasmid mixture is transformed into a suitable host, as indicated above (such as XL-1 Blue (Stratagene)) using techniques known to those of skill in the art, such as those provided by the vector supplier or in related publications or patents cited above. The transformants are plated on 1.5% agar plates (containing the appropriate selection agent, e.g., ampicillin) to a density of about 150 transformants (colonies) per plate. These plates are screened using Nylon membranes according to routine methods for bacterial colony screening (e.g., Sambrook et al., Molecular Cloning: A Laboratory Manual, 2nd Edit., (1989), Cold Spring Harbor Laboratory Press, pages 1.93 to 1.104), or other techniques known to those of skill in the art.

[2276] Alternatively, two primers of 17-20 nucleotides derived from both ends of the SEQ ID NO:X (i.e., within the region of SEQ ID NO:X bounded by the 5′ NT and the 3′ NT of the clone defined in Table 1) are synthesized and used to amplify the desired cDNA using the deposited cDNA plasmid as a template. The polymerase chain reaction is carried out under routine conditions, for instance, in 25 ul of reaction mixture with 0.5 ug of the above cDNA template. A convenient reaction mixture is 1.5-5 mM MgCl₂, 0.01% (w/v) gelatin, 20 uM each of dATP, dCTP, dGTP, dTTP, 25 pmol of each primer and 0.25 Unit of Taq polymerase. Thirty five cycles of PCR (denaturation at 94 degree C. for 1 min; annealing at 55 degree C. for 1 min; elongation at 72 degree C. for 1 min) are performed with a Perkin-Elmer Cetus automated thermal cycler. The amplified product is analyzed by agarose gel electrophoresis and the DNA band with expected molecular weight is excised and purified. The PCR product is verified to be the selected sequence by subcloning and sequencing the DNA product.

[2277] Several methods are available for the identification of the 5′ or 3′ non-coding portions of a gene which may not be present in the deposited clone. These methods include but are not limited to, filter probing, clone enrichment using specific probes, and protocols similar or identical to 5′ and 3′ “RACE” protocols which are well known in the art. For instance, a method similar to 5′ RACE is available for generating the missing 5′ end of a desired full-length transcript. (Fromont-Racine et al., Nucleic Acids Res. 21(7):1683-1684 (1993).)

[2278] Briefly, a specific RNA oligonucleotide is ligated to the 5′ ends of a population of RNA presumably containing full-length gene RNA transcripts. A primer set containing a primer specific to the ligated RNA oligonucleotide and a primer specific to a known sequence of the gene of interest is used to PCR amplify the 5′ portion of the desired full-length gene. This amplified product may then be sequenced and used to generate the full length gene.

[2279] This above method starts with total RNA isolated from the desired source, although poly-A+ RNA can be used. The RNA preparation can then be treated with phosphatase if necessary to eliminate 5′ phosphate groups on degraded or damaged RNA which may interfere with the later RNA ligase step. The phosphatase should then be inactivated and the RNA treated with tobacco acid pyrophosphatase in order to remove the cap structure present at the 5′ ends of messenger RNAs. This reaction leaves a 5′ phosphate group at the 5′ end of the cap cleaved RNA which can then be ligated to an RNA oligonucleotide using T4 RNA ligase.

[2280] This modified RNA preparation is used as a template for first strand cDNA synthesis using a gene specific oligonucleotide. The first strand synthesis reaction is used as a template for PCR amplification of the desired 5′ end using a primer specific to the ligated RNA oligonucleotide and a primer specific to the known sequence of the gene of interest. The resultant product is then sequenced and analyzed to confirm that the 5′ end sequence belongs to the desired gene.

### Example 2

### Isolation of Genomic Clones Corresponding to a Polynucleotide

[2281] A human genomic P1 library (Genomic Systems, Inc.) is screened by PCR using primers selected for the cDNA sequence corresponding to SEQ ID NO:X., according to the method described in Example 1. (See also, Sambrook.)

### Example 3

### Tissue Distribution of Polypeptide

[2282] Tissue distribution of mRNA expression of polynucleotides of the present invention is determined using protocols for Northern blot analysis, described by, among others, Sambrook et al. For example, a cDNA probe produced by the method described in Example 1 is labeled with P³² using the rediprime™ DNA labeling system (Amersham Life Science), according to manufacturer's instructions. After labeling, the probe is purified using CHROMA SPIN-100™ column (Clontech Laboratories, Inc.), according to manufacturer's protocol number PT1200-1. The purified labeled probe is then used to examine various human tissues for mRNA expression.

[2283] Multiple Tissue Northern (MTN) blots containing various human tissues (H) or human immune system tissues (IM) (Clontech) are examined with the labeled probe using ExpressHyb™ hybridization solution (Clontech) according to manufacturer's protocol number PT1190-1. Following hybridization and washing, the blots are mounted and exposed to film at −70 degree C. overnight, and the films developed according to standard procedures.

### Example 4

### Chromosomal Mapping of the Polynucleotides

[2284] An oligonucleotide primer set is designed according to the sequence at the 5′ end of SEQ ID NO:X. This primer preferably spans about 100 nucleotides. This primer set is then used in a polymerase chain reaction under the following set of conditions: 30 seconds, 95 degree C.; 1 minute, 56 degree C.; 1 minute, 70 degree C. This cycle is repeated 32 times followed by one 5 minute cycle at 70 degree C. Human, mouse, and hamster DNA is used as template in addition to a somatic cell hybrid panel containing individual chromosomes or chromosome fragments (Bios, Inc). The reactions is analyzed on either 8% polyacrylamide gels or 3.5% agarose gels. Chromosome mapping is determined by the presence of an approximately 100 bp PCR fragment in the particular somatic cell hybrid.

### Example 5

### Bacterial Expression of a Polypeptide

[2285] A polynucleotide encoding a polypeptide of the present invention is amplified using PCR oligonucleotide primers corresponding to the 5′ and 3′ ends of the DNA sequence, as outlined in Example 1, to synthesize insertion fragments. The primers used to amplify the cDNA insert should preferably contain restriction sites, such as BamHI and XbaI, at the 5′ end of the primers in order to clone the amplified product into the expression vector. For example, BamHI and XbaI correspond to the restriction enzyme sites on the bacterial expression vector pQE-9. (Qiagen, Inc., Chatsworth, Calif.). This plasmid vector encodes antibiotic resistance (Amp^{r}), a bacterial origin of replication (ori), an IPTG-regulatable promoter/operator (P/O), a ribosome binding site (RBS), a 6-histidine tag (6-His), and restriction enzyme cloning sites.

[2286] The pQE-9 vector is digested with BamHI and XbaI and the amplified fragment is ligated into the pQE-9 vector maintaining the reading frame initiated at the bacterial RBS. The ligation mixture is then used to transform the E. coli strain M15/rep4 (Qiagen, Inc.) which contains multiple copies of the plasmid pREP4, which expresses the lacI repressor and also confers kanamycin resistance (Kan^{r}). Transformants are identified by their ability to grow on LB plates and ampicillin/kanamycin resistant colonies are selected. Plasmid DNA is isolated and confirmed by restriction analysis.

[2287] Clones containing the desired constructs are grown overnight (O/N) in liquid culture in LB media supplemented with both Amp (100 ug/ml) and Kan (25 ug/ml). The O/N culture is used to inoculate a large culture at a ratio of 1:100 to 1:250. The cells are grown to an optical density 600 (O.D.⁶⁰⁰) of between 0.4 and 0.6. IPTG (Isopropyl-B-D-thiogalacto pyranoside) is then added to a final concentration of 1 mM. IPTG induces by inactivating the lacI repressor, clearing the P/O leading to increased gene expression.

[2288] Cells are grown for an extra 3 to 4 hours. Cells are then harvested by centrifugation (20 mins at 6000×g). The cell pellet is solubilized in the chaotropic agent 6 Molar Guanidine HCl by stirring for 3-4 hours at 4 degree C. The cell debris is removed by centrifugation, and the supernatant containing the polypeptide is loaded onto a nickel-nitrilo-tri-acetic acid (“Ni-NTA”) affinity resin column (available from QIAGEN, Inc., supra). Proteins with a 6×His tag bind to the Ni-NTA resin with high affinity and can be purified in a simple one-step procedure (for details see: The QIAexpressionist (1995) QIAGEN, Inc., supra).

[2289] Briefly, the supernatant is loaded onto the column in 6 M guanidine-HCl, pH 8, the column is first washed with 10 volumes of 6 M guanidine-HCl, pH 8, then washed with 10 volumes of 6 M guanidine-HCl pH 6, and finally the polypeptide is eluted with 6 M guanidine-HCl, pH 5.

[2290] The purified protein is then renatured by dialyzing it against phosphate-buffered saline (PBS) or 50 mM Na-acetate, pH 6 buffer plus 200 mM NaCl. Alternatively, the protein can be successfully refolded while immobilized on the Ni-NTA column. The recommended conditions are as follows: renature using a linear 6M-1M urea gradient in 500 mM NaCl, 20% glycerol, 20 mM Tris/HCl pH 7.4, containing protease inhibitors. The renaturation should be performed over a period of 1.5 hours or more. After renaturation the proteins are eluted by the addition of 250 mM immidazole. Immidazole is removed by a final dialyzing step against PBS or 50 mM sodium acetate pH 6 buffer plus 200 mM NaCl. The purified protein is stored at 4 degree C. or frozen at −80 degree C.

[2291] In addition to the above expression vector, the present invention further includes an expression vector comprising phage operator and promoter elements operatively linked to a polynucleotide of the present invention, called pHE4a. (ATCC Accession Number 209645, deposited on Feb. 25, 1998.) This vector contains: 1) a neomycinphosphotransferase gene as a selection marker, 2) an E. coli origin of replication, 3) a T5 phage promoter sequence, 4) two lac operator sequences, 5) a Shine-Delgarno sequence, and 6) the lactose operon repressor gene (lacIq). The origin of replication (oriC) is derived from pUC19 (LTI, Gaithersburg, Md.). The promoter sequence and operator sequences are made synthetically.

[2292] DNA can be inserted into the pHEa by restricting the vector with NdeI and XbaI, BamHI, XhoI, or Asp718, running the restricted product on a gel, and isolating the larger fragment (the stuffer fragment should be about 310 base pairs). The DNA insert is generated according to the PCR protocol described in Example 1, using PCR primers having restriction sites for NdeI (5′ primer) and XbaI, BamHI, XhoI, or Asp718 (3′ primer). The PCR insert is gel purified and restricted with compatible enzymes. The insert and vector are ligated according to standard protocols. The engineered vector could easily be substituted in the above protocol to express protein in a bacterial system.

### Example 6

### Purification of a Polypeptide from an Inclusion Body

[2293] The following alternative method can be used to purify a polypeptide expressed in E coli when it is present in the form of inclusion bodies. Unless otherwise specified, all of the following steps are conducted at 4-10 degree C.

[2294] Upon completion of the production phase of the E. coli fermentation, the cell culture is cooled to 4-10 degree C. and the cells harvested by continuous centrifugation at 15,000 rpm (Heraeus Sepatech). On the basis of the expected yield of protein per unit weight of cell paste and the amount of purified protein required, an appropriate amount of cell paste, by weight, is suspended in a buffer solution containing 100 mM Tris, 50 mM EDTA, pH 7.4. The cells are dispersed to a homogeneous suspension using a high shear mixer.

[2295] The cells are then lysed by passing the solution through a microfluidizer (Microfuidics, Corp. or APV Gaulin, Inc.) twice at 4000-6000 psi. The homogenate is then mixed with NaCl solution to a final concentration of 0.5 M NaCl, followed by centrifugation at 7000×g for 15 min. The resultant pellet is washed again using 0.5M NaCl, 100 mM Tris, 50 mM EDTA, pH 7.4.

[2296] The resulting washed inclusion bodies are solubilized with 1.5 M guanidine hydrochloride (GuHCl) for 2-4 hours. After 7000×g centrifugation for 15 min., the pellet is discarded and the polypeptide containing supernatant is incubated at 4 degree C. overnight to allow further GuHCl extraction.

[2297] Following high speed centrifugation (30,000×g) to remove insoluble particles, the GuHCl solubilized protein is refolded by quickly mixing the GuHCl extract with 20 volumes of buffer containing 50 mM sodium, pH 4.5, 150 mM NaCl, 2 mM EDTA by vigorous stirring. The refolded diluted protein solution is kept at 4 degree C. without mixing for 12 hours prior to further purification steps.

[2298] To clarify the refolded polypeptide solution, a previously prepared tangential filtration unit equipped with 0.16 um membrane filter with appropriate surface area (e.g., Filtron), equilibrated with 40 mM sodium acetate, pH 6.0 is employed. The filtered sample is loaded onto a cation exchange resin (e.g., Poros HS-50, Perseptive Biosystems). The column is washed with 40 mM sodium acetate, pH 6.0 and eluted with 250 mM, 500 mM, 1000 mM, and 1500 mM NaCl in the same buffer, in a stepwise manner. The absorbance at 280 nm of the effluent is continuously monitored. Fractions are collected and further analyzed by SDS-PAGE.

[2299] Fractions containing the polypeptide are then pooled and mixed with 4 volumes of water. The diluted sample is then loaded onto a previously prepared set of tandem columns of strong anion (Poros HQ-50, Perseptive Biosystems) and weak anion (Poros CM-20, Perseptive Biosystems) exchange resins. The columns are equilibrated with 40 mM sodium acetate, pH 6.0. Both columns are washed with 40 mM sodium acetate, pH 6.0,200 mM NaCl. The CM-20 column is then eluted using a 10 column volume linear gradient ranging from 0.2 M NaCl, 50 mM sodium acetate, pH 6.0 to 1.0 M NaCl, 50 mM sodium acetate, pH 6.5. Fractions are collected under constant A₂₈₀ monitoring of the effluent. Fractions containing the polypeptide (determined, for instance, by 16% SDS-PAGE) are then pooled.

[2300] The resultant polypeptide should exhibit greater than 95% purity after the above refolding and purification steps. No major contaminant bands should be observed from Commassie blue stained 16% SDS-PAGE gel when 5 ug of purified protein is loaded. The purified protein can also be tested for endotoxin/LPS contamination, and typically the LPS content is less than 0.1 ng/ml according to LAL assays.

### Example 7

### Cloning and Expression of a Polypeptide in a Baculovirus Expression System

[2301] In this example, the plasmid shuttle vector pA2 is used to insert a polynucleotide into a baculovirus to express a polypeptide. This expression vector contains the strong polyhedrin promoter of the Autographa californica nuclear polyhedrosis virus (AcMNPV) followed by convenient restriction sites such as BamHI, Xba I and Asp718. The polyadenylation site of the simian virus 40 (“SV40”) is used for efficient polyadenylation. For easy selection of recombinant virus, the plasmid contains the beta-galactosidase gene from E. coli under control of a weak Drosophila promoter in the same orientation, followed by the polyadenylation signal of the polyhedrin gene. The inserted genes are flanked on both sides by viral sequences for cell-mediated homologous recombination with wild-type viral DNA to generate a viable virus that express the cloned polynucleotide.

[2302] Many other baculovirus vectors can be used in place of the vector above, such as pAc373, pVL941, and pAcIMN, as one skilled in the art would readily appreciate, as long as the construct provides appropriately located signals for transcription, translation, secretion and the like, including a signal peptide and an in-frame AUG as required. Such vectors are described, for instance, in Luckow et al., Virology 170:31-39 (1989).

[2303] Specifically, the cDNA sequence contained in the deposited clone, including the AUG initiation codon and the naturally associated leader sequence identified in Table 1, is amplified using the PCR protocol described in Example 1. If the naturally occurring signal sequence is used to produce the secreted protein, the pA2 vector does not need a second signal peptide. Alternatively, the vector can be modified (pA2 GP) to include a baculovirus leader sequence, using the standard methods described in Summers et al., “A Manual of Methods for Baculovirus Vectors and Insect Cell Culture Procedures,” Texas Agricultural Experimental Station Bulletin No. 1555 (1987).

[2304] The amplified fragment is isolated from a 1% agarose gel using a commercially available kit (“Geneclean,” BIO 101 Inc., La Jolla, Calif.). The fragment then is digested with appropriate restriction enzymes and again purified on a 1% agarose gel.

[2305] The plasmid is digested with the corresponding restriction enzymes and optionally, can be dephosphorylated using calf intestinal phosphatase, using routine procedures known in the art. The DNA is then isolated from a 1% agarose gel using a commercially available kit (“Geneclean” BIO 101 Inc., La Jolla, Calif.).

[2306] The fragment and the dephosphorylated plasmid are ligated together with T4 DNA ligase. E. coli HB101 or other suitable E. coli hosts such as XL-1 Blue (Stratagene Cloning Systems, La Jolla, Calif.) cells are transformed with the ligation mixture and spread on culture plates. Bacteria containing the plasmid are identified by digesting DNA from individual colonies and analyzing the digestion product by gel electrophoresis. The sequence of the cloned fragment is confirmed by DNA sequencing.

[2307] Five ug of a plasmid containing the polynucleotide is co-transfected with 1.0 ug of a commercially available linearized baculovirus DNA (“BaculoGold™ baculovirus DNA”, Pharmingen, San Diego, Calif.), using the lipofection method described by Felgner et al., Proc. Natl. Acad. Sci. USA 84:7413-7417 (1987). One ug of BaculoGold™ virus DNA and 5 ug of the plasmid are mixed in a sterile well of a microtiter plate containing 50 ul of serum-free Grace's medium (Life Technologies Inc., Gaithersburg, Md.). Afterwards, 10 ul Lipofectin plus 90 ul Grace's medium are added, mixed and incubated for 15 minutes at room temperature. Then the transfection mixture is added drop-wise to Sf9 insect cells (ATCC CRL 1711) seeded in a 35 mm tissue culture plate with 1 ml Grace's medium without serum. The plate is then incubated for 5 hours at 27 degrees C. The transfection solution is then removed from the plate and 1 ml of Grace's insect medium supplemented with 10% fetal calf serum is added. Cultivation is then continued at 27 degrees C. for four days.

[2308] After four days the supernatant is collected and a plaque assay is performed, as described by Summers and Smith, supra. An agarose gel with “Blue Gal” (Life Technologies Inc., Gaithersburg) is used to allow easy identification and isolation of gal-expressing clones, which produce blue-stained plaques. (A detailed description of a “plaque assay” of this type can also be found in the user's guide for insect cell culture and baculovirology distributed by Life Technologies Inc., Gaithersburg, page 9-10.) After appropriate incubation, blue stained plaques are picked with the tip of a micropipettor (e.g., Eppendorf). The agar containing the recombinant viruses is then resuspended in a microcentrifuge tube containing 200 ul of Grace's medium and the suspension containing the recombinant baculovirus is used to infect Sf9 cells seeded in 35 mm dishes. Four days later the supernatants of these culture dishes are harvested and then they are stored at 4 degree C.

[2309] To verify the expression of the polypeptide, Sf9 cells are grown in Grace's medium supplemented with 10% heat-inactivated FBS. The cells are infected with the recombinant baculovirus containing the polynucleotide at a multiplicity of infection (“MOI”) of about 2. If radiolabeled proteins are desired, 6 hours later the medium is removed and is replaced with SF900 II medium minus methionine and cysteine (available from Life Technologies Inc., Rockville, Md.). After 42 hours, 5 uCi of ³⁵S-methionine and 5 uCi ³⁵S-cysteine (available from Amersham) are added. The cells are further incubated for 16 hours and then are harvested by centrifugation. The proteins in the supernatant as well as the intracellular proteins are analyzed by SDS-PAGE followed by autoradiography (if radiolabeled).

[2310] Microsequencing of the amino acid sequence of the amino terminus of purified protein may be used to determine the amino terminal sequence of the produced protein.

### Example 8

### Expression of a Polypeptide in Mammalian Cells

[2311] The polypeptide of the present invention can be expressed in a mammalian cell. A typical mammalian expression vector contains a promoter element, which mediates the initiation of transcription of mRNA, a protein coding sequence, and signals required for the termination of transcription and polyadenylation of the transcript. Additional elements include enhancers, Kozak sequences and intervening sequences flanked by donor and acceptor sites for RNA splicing. Highly efficient transcription is achieved with the early and late promoters from SV40, the long terminal repeats (LTRs) from Retroviruses, e.g., RSV, HTLVI, HIVI and the early promoter of the cytomegalovirus (CMV). However, cellular elements can also be used (e.g., the human actin promoter).

[2312] Suitable expression vectors for use in practicing the present invention include, for example, vectors such as pSVL and pMSG (Pharmacia, Uppsala, Sweden), pRSVcat (ATCC 37152), pSV2dhfr (ATCC 37146), pBC12MI (ATCC 67109), pCMVSport 2.0, and pCMVSport 3.0. Mammalian host cells that could be used include, human Hela, 293, H9 and Jurkat cells, mouse NIH3T3 and C127 cells, Cos 1, Cos 7 and CV1, quail QC1-3 cells, mouse L cells and Chinese hamster ovary (CHO) cells.

[2313] Alternatively, the polypeptide can be expressed in stable cell lines containing the polynucleotide integrated into a chromosome. The co-transfection with a selectable marker such as dhfr, gpt, neomycin, hygromycin allows the identification and isolation of the transfected cells.

[2314] The transfected gene can also be amplified to express large amounts of the encoded protein. The DHFR (dihydrofolate reductase) marker is useful in developing cell lines that carry several hundred or even several thousand copies of the gene of interest. (See, e.g., Alt, F. W., et al., J. Biol. Chem. 253:1357-1370 (1978); Hamlin, J. L. and Ma, C., Biochem. et Biophys. Acta, 1097:107-143 (1990); Page, M. J. and Sydenham, M. A., Biotechnology 9:64-68 (1991).) Another useful selection marker is the enzyme glutamine synthase (GS) (Murphy et al., Biochem J. 227:277-279 (1991); Bebbington et al., Bio/Technology 10:169-175 (1992). Using these markers, the mammalian cells are grown in selective medium and the cells with the highest resistance are selected. These cell lines contain the amplified gene(s) integrated into a chromosome. Chinese hamster ovary (CHO) and NSO cells are often used for the production of proteins.

[2315] Derivatives of the plasmid pSV2-dhfr (ATCC Accession No. 37146), the expression vectors pC4 (ATCC Accession No. 209646) and pC6 (ATCC Accession No.209647) contain the strong promoter (LTR) of the Rous Sarcoma Virus (Cullen et al., Molecular and Cellular Biology, 438-447 (March, 1985)) plus a fragment of the CMV-enhancer (Boshart et al., Cell 41:521-530 (1985).) Multiple cloning sites, e.g., with the restriction enzyme cleavage sites BamHI, XbaI and Asp718, facilitate the cloning of the gene of interest. The vectors also contain the 3′ intron, the polyadenylation and termination signal of the rat preproinsulin gene, and the mouse DHFR gene under control of the SV40 early promoter.

[2316] Specifically, the plasmid pC6, for example, is digested with appropriate restriction enzymes and then dephosphorylated using calf intestinal phosphates by procedures known in the art. The vector is then isolated from a 1% agarose gel.

[2317] A polynucleotide of the present invention is amplified according to the protocol outlined in Example 1. If the naturally occurring signal sequence is used to produce the secreted protein, the vector does not need a second signal peptide. Alternatively, if the naturally occurring signal sequence is not used, the vector can be modified to include a heterologous signal sequence. (See, e.g., WO 96/34891.)

[2318] The amplified fragment is isolated from a 1% agarose gel using a commercially available kit (“Geneclean,” BIO 101 Inc., La Jolla, Calif.). The fragment then is digested with appropriate restriction enzymes and again purified on a 1% agarose gel.

[2319] The amplified fragment is then digested with the same restriction enzyme and purified on a 1% agarose gel. The isolated fragment and the dephosphorylated vector are then ligated with T4 DNA ligase. E. coli HB101 or XL-1 Blue cells are then transformed and bacteria are identified that contain the fragment inserted into plasmid pC6 using, for instance, restriction enzyme analysis.

[2320] Chinese hamster ovary cells lacking an active DHFR gene is used for transfection. Five μg of the expression plasmid pC6 a pC4 is cotransfected with 0.5 ug of the plasmid pSVneo using lipofectin (Felgner et al., supra). The plasmid pSV2-neo contains a dominant selectable marker, the neo gene from Tn5 encoding an enzyme that confers resistance to a group of antibiotics including G418. The cells are seeded in alpha minus MEM supplemented with 1 mg/ml G418. After 2 days, the cells are trypsinized and seeded in hybridoma cloning plates (Greiner, Germany) in alpha minus MEM supplemented with 10, 25, or 50 ng/ml of metothrexate plus 1 mg/ml G418. After about 10-14 days single clones are trypsinized and then seeded in 6-well petri dishes or 10 ml flasks using different concentrations of methotrexate (50 nM, 100 nM, 200 nM, 400 nM, 800 nM). Clones growing at the highest concentrations of methotrexate are then transferred to new 6-well plates containing even higher concentrations of methotrexate (1 uM, 2 uM, 5 uM, 10 mM, 20 mM). The same procedure is repeated until clones are obtained which grow at a concentration of 100-200 uM. Expression of the desired gene product is analyzed, for instance, by SDS-PAGE and Western blot or by reversed phase HPLC analysis.

### Example 9

### Protein Fusions

[2321] The polypeptides of the present invention are preferably fused to other proteins. These fusion proteins can be used for a variety of applications. For example, fusion of the present polypeptides to His-tag, HA-tag, protein A, IgG domains, and maltose binding protein facilitates purification. (See Example 5; see also EP A 394,827; Traunecker, et al., Nature 331:84-86 (1988).) Similarly, fusion to IgG-1, IgG-3, and albumin increases the halflife time in vivo. Nuclear localization signals fused to the polypeptides of the present invention can target the protein to a specific subcellular localization, while covalent heterodimer or homodimers can increase or decrease the activity of a fusion protein. Fusion proteins can also create chimeric molecules having more than one function. Finally, fusion proteins can increase solubility and/or stability of the fused protein compared to the non-fused protein. All of the types of fusion proteins described above can be made by modifying the following protocol, which outlines the fusion of a polypeptide to an IgG molecule, or the protocol described in Example 5.

[2322] Briefly, the human Fc portion of the IgG molecule can be PCR amplified, using primers that span the 5′ and 3′ ends of the sequence described below. These primers also should have convenient restriction enzyme sites that will facilitate cloning into an expression vector, preferably a mammalian expression vector.

[2323] For example, if pC4 (Accession No. 209646) is used, the human Fc portion can be ligated into the BamHI cloning site. Note that the 3′ BamHI site should be destroyed. Next, the vector containing the human Fc portion is re-restricted with BamHI, linearizing the vector, and a polynucleotide of the present invention, isolated by the PCR protocol described in Example 1, is ligated into this BaniHI site. Note that the polynucleotide is cloned without a stop codon, otherwise a fusion protein will not be produced.

[2324] If the naturally occurring signal sequence is used to produce the secreted protein, pC4 does not need a second signal peptide. Alternatively, if the naturally occurring signal sequence is not used, the vector can be modified to include a heterologous signal sequence. (See, e.g., WO 96/34891.) Human IgG Fc region:

(SEQ ID NO:1)

GGGATCCGGAGCCCAAATCTTCTGACAAAACTCACACATGCCCACCGTGC
CCAGCACCTGAATTCGAGGGTGCACCGTCAGTCTTCCTCTTCCCCCCAAA
ACCCAAGGACACCCTCATGATCTCCCGGACTCCTGAGGTCACATGCGTGG
TGGTGGACGTAAGCCACGAAGACCCTGAGGTCAAGTTCAACTGGTACGTG
GACGGCGTGGAGGTGCATAATGCCAAGACAAAGCCGCGGGAGGAGCAGTA
CAACAGCACGTACCGTGTGGTCAGCGTCCTCACCGTCCTGCACCAGGACT
GGCTGAATGGCAAGGAGTACAAGTGCAAGGTCTCCAACAAAGCCCTCCCA
ACCCCCATCGAGAAAACCATCTCCAAAGCCAAAGGGCAGCCCCGAGAACC
ACAGGTGTACACCCTGCCCCCATCCCGGGATGAGCTGACCAAGAACCAGG
TCAGCCTGACCTGCCTGGTCAAAGGCTTCTATCCAAGCGACATCGCCGTG
GAGTGGGAGAGCAATGGGCAGCCGGAGAACAACTACAAGACCACGCCTCC
CGTGCTGGACTCCGACGGCTCCTTCTTCCTCTACAGCAAGCTCACCGTGG
ACAAGAGCAGGTGGCAGCAGGGGAACGTCTTCTCATGCTCCGTGATGCAT
GAGGCTCTGCACAACCACTACACGCAGAAGAGCCTCTCCCTGTCTCCGGG
TAAATGAGTGCGACGGCCGCGACTCTAGAGGAT

### Example 10

### Production of an Antibody from a Polypeptide

[2325] The antibodies of the present invention can be prepared by a variety of methods. (See, Current Protocols, Chapter 2.) As one example of such methods, cells expressing a polypeptide of the present invention is administered to an animal to induce the production of sera containing polyclonal antibodies. In a preferred method, a preparation of the secreted protein is prepared and purified to render it substantially free of natural contaminants. Such a preparation is then introduced into an animal in order to produce polyclonal antisera of greater specific activity.

[2326] In the most preferred method, the antibodies of the present invention are monoclonal antibodies (or protein binding fragments thereof). Such monoclonal antibodies can be prepared using hybridoma technology. (Kohler et al., Nature 256:495 (1975); Kohler et al., Eur. J. Immunol. 6:511 (1976); Kohler et al., Eur. J. Immunol. 6:292 (1976); Hammerling et al., in: Monoclonal Antibodies and T-Cell Hybridomas, Elsevier, N.Y., pp. 563-681 (1981).) In general, such procedures involve immunizing an animal (preferably a mouse) with polypeptide or, more preferably, with a secreted polypeptide-expressing cell. Such cells may be cultured in any suitable tissue culture medium; however, it is preferable to culture cells in Earle's modified Eagle's medium supplemented with 10% fetal bovine serum (inactivated at about 56 degrees C.), and supplemented with about 10 g/l of nonessential amino acids, about 1,000 U/ml of penicillin, and about 100 ug/ml of streptomycin.

[2327] The splenocytes of such mice are extracted and fused with a suitable myeloma cell line. Any suitable myeloma cell line may be employed in accordance with the present invention; however, it is preferable to employ the parent myeloma cell line (SP20), available from the ATCC. After fusion, the resulting hybridoma cells are selectively maintained in HAT medium, and then cloned by limiting dilution as described by Wands et al. (Gastroenterology 80:225-232 (1981).) The hybridoma cells obtained through such a selection are then assayed to identify clones which secrete antibodies capable of binding the polypeptide.

[2328] Alternatively, additional antibodies capable of binding to the polypeptide can be produced in a two-step procedure using anti-idiotypic antibodies. Such a method makes use of the fact that antibodies are themselves antigens, and therefore, it is possible to obtain an antibody which binds to a second antibody. In accordance with this method, protein specific antibodies are used to immunize an animal, preferably a mouse. The splenocytes of such an animal are then used to produce hybridoma cells, and the hybridoma cells are screened to identify clones which produce an antibody whose ability to bind to the protein-specific antibody can be blocked by the polypeptide. Such antibodies comprise anti-idiotypic antibodies to the protein-specific antibody and can be used to immunize an animal to induce formation of further protein-specific antibodies.

[2329] It will be appreciated that Fab and F(ab′)₂ and other fragments of the antibodies of the present invention may be used according to the methods disclosed herein. Such fragments are typically produced by proteolytic cleavage, using enzymes such as papain (to produce Fab fragments) or pepsin (to produce F(ab′)2 fragments). Alternatively, secreted protein-binding fragments can be produced through the application of recombinant DNA technology or through synthetic chemistry.

[2330] For in vivo use of antibodies in humans, it may be preferable to use “humanized” chimeric monoclonal antibodies. Such antibodies can be produced using genetic constructs derived from hybridoma cells producing the monoclonal antibodies described above. Methods for producing chimeric antibodies are known in the art. (See, for review, Morrison, Science 229:1202 (1985); Oi et al., BioTechniques 4:214 (1986); Cabilly et al., U.S. Pat. No. 4,816,567; Taniguchi et al., EP 171496; Morrison et al., EP 173494; Neuberger et al., WO 8601533; Robinson et al., WO 8702671; Boulianne et al., Nature 312:643 (1984); Neuberger et al., Nature 314:268 (1985).)

### Example 11

### Production of Secreted Protein for High-Throughput Screening Assays

[2331] The following protocol produces a supernatant containing a polypeptide to be tested. This supernatant can then be used in the Screening Assays described herein.

[2332] First, dilute Poly-D-Lysine (644 587 Boehringer-Mannheim) stock solution (1 mg/ml in PBS) 1:20 in PBS (w/o calcium or magnesium 17-516F Biowhittaker) for a working solution of 50 ug/ml. Add 200 ul of this solution to each well (24 well plates) and incubate at RT for 20 minutes. Be sure to distribute the solution over each well (note: a 12-channel pipetter may be used with tips on every other channel). Aspirate off the Poly-D-Lysine solution and rinse with 1 ml PBS (Phosphate Buffered Saline). The PBS should remain in the well until just prior to plating the cells and plates may be poly-lysine coated in advance for up to two weeks.

[2333] Plate 293T cells (do not carry cells past P+20) at 2×10⁵ cells/well in 0.5 ml DMEM (Dulbecco's Modified Eagle Medium)(with 4.5 GIL glucose and L-glutamine (12-604F Biowhittaker))/10% heat inactivated FBS (14-503F Biowhittaker)/1×Penstrep (17-602E Biowhittaker). Let the cells grow overnight.

[2334] The next day, mix together in a sterile solution basin: 300 ul Lipofectamine (18324-012 Gibco/BRL) and 5 ml Optimem 1 (31985070 Gibco/BRL)/96-well plate. With a small volume multi-channel pipetter, aliquot approximately 2 ug of an expression vector containing a polynucleotide insert, produced by the methods described in Examples 8 or 9, into an appropriately labeled 96-well round bottom plate. With a multi-channel pipetter, add 50 ul of the Lipofectamine/Optimem I mixture to each well. Pipette up and down gently to mix. Incubate at RT 15-45 minutes. After about 20 minutes, use a multi-channel pipetter to add 150 ul Optimem I to each well. As a control, one plate of vector DNA lacking an insert should be transfected with each set of transfections.

[2335] Preferably, the transfection should be performed by tag-teaming the following tasks. By tag-teaming, hands on time is cut in half, and the cells do not spend too much time on PBS. First, person A aspirates off the media from four 24-well plates of cells, and then person B rinses each well with 0.5-1 ml PBS. Person A then aspirates off PBS rinse, and person B, using a12-channel pipetter with tips on every other channel, adds the 200 ul of DNA/Lipofectamine/Optimem I complex to the odd wells first, then to the even wells, to each row on the 24-well plates. Incubate at 37 degrees C. for 6 hours.

[2336] While cells are incubating, prepare appropriate media, either 1%BSA in DMEM with 1×penstrep, or CHO-5 media (116.6 mg/L of CaCl₂ (anhyd); 0.00130 mg/L CuSO₄-5H₂O; 0.050 mg/L of Fe(NO₃)₃-9H₂O; 0.417 mg/L of FeSO₄-7H₂O; 311.80 mg/L of Kcl; 28.64 mg/L of MgCl₂; 48.84 mg/L of MgSO₄; 6995.50 mg/L of NaCl; 2400.0 mg/L of NaHCO₃; 62.50 mg/L of NaH₂PO₄—H₂O; 71.02 mg/L of Na₂HPO4; 0.4320 mg/L of ZnSO₄.7H₂0; 0.002 mg/L of Arachidonic Acid; 1.022 mg/L of Cholesterol; 0.070 mg/L of DL-alpha-Tocopherol-Acetate; 0.0520 mg/L of Linoleic Acid; 0.010 mg/L of Linolenic Acid; 0.010 mg/L of Myristic Acid; 0.010 mg/L of Oleic Acid; 0.010 mg/L of Palmitric Acid; 0.010 mg/L of Palmitic Acid; 100 mg/L of Pluronic F-68; 0.010 mg/L of Stearic Acid; 2.20 mg/L of Tween 80; 4551 mg/L of D-Glucose; 130.85 mg/ml of L-Alanine; 147.50 mg/ml of L-Arginine-HCL; 7.50 mg/ml of L-Asparagine-H₂0; 6.65 mg/ml of L-Aspartic Acid; 29.56 mg/ml of L-Cystine-2HCL-H₂0; 31.29 mg/ml of L-Cystine-2HCL; 7.35 mg/ml of L-Glutamic Acid; 365.0 mg/ml of L-Glutamine; 18.75 mg/ml of Glycine; 52.48 mg/ml of L-Histidine-HCL-H₂0; 106.97 mg/ml of L-Isoleucine; 111.45 mg/ml of L-Leucine; 163.75 mg/ml of L-Lysine HCL; 32.34 mg/ml of L-Methionine; 68.48 mg/ml of L-Phenylalainine; 40.0 mg/ml of L-Proline; 26.25 mg/ml of L-Serine; 101.05 mg/ml of L-Threonine; 19.22 mg/ml of L-Tryptophan; 91.79 mg/ml of L-Tryrosine-2Na-2H₂0; 99.65 mg/ml of L-Valine; 0.0035 mg/L of Biotin; 3.24 mg/L of D-Ca Pantothenate; 11.78 mg/L of Choline Chloride; 4.65 mg/L of Folic Acid; 15.60 mg/L of i-Inositol; 3.02 mg/L of Niacinamide; 3.00 mg/L of Pyridoxal HCL; 0.031 mg/L of Pyridoxine HCL; 0.319 mg/L of Riboflavin; 3.17 mg/L of Thiamine HCL; 0.365 mg/L of Thymidine; and 0.680 mg/L of Vitamin B₁₂; 25 mM of HEPES Buffer; 2.39 mg/L of Na Hypoxanthine; 0.105 mg/L of Lipoic Acid; 0.081 mg/L of Sodium Putrescine-2HCL; 55.0 mg/L of Sodium Pyruvate; 0.0067 mg/L of Sodium Selenite; 20 uM of Ethanolamine; 0.122 mg/L of Ferric Citrate; 41.70 mg/L of Methyl-B-Cyclodextrin complexed with Linoleic Acid; 33.33 mg/L of Methyl-B-Cyclodextrin complexed with Oleic Acid; and 10 mg/L of Methyl-B-Cyclodextrin complexed with Retinal) with 2 mm glutamine and 1×penstrep. (BSA (81-068-3 Bayer) 100 gm dissolved in 1L DMEM for a 10% BSA stock solution). Filter the media and collect 50 ul for endotoxin assay in 15 ml polystyrene conical.

[2337] The transfection reaction is terminated, preferably by tag-teaming, at the end of the incubation period. Person A aspirates off the transfection media, while person B adds 1.5 ml appropriate media to each well. Incubate at 37 degrees C. for 45 or 72 hours depending on the media used: 1%BSA for 45 hours or CHO-5 for 72 hours.

[2338] On day four, using a 300 ul multichannel pipetter, aliquot 600 ul in one 1 ml deep well plate and the remaining supernatant into a 2 ml deep well. The supernatants from each well can then be used in the assays described in Examples 13-20.

[2339] It is specifically understood that when activity is obtained in any of the assays described below using a supernatant, the activity originates from either the polypeptide directly (e.g., as a secreted protein) or by the polypeptide inducing expression of other proteins, which are then secreted into the supernatant. Thus, the invention further provides a method of identifying the protein in the sup ematant characterized by an activity in a particular assay.

### Example 12

### Construction of GAS Reporter Construct

[2340] One signal transduction pathway involved in the differentiation and proliferation of cells is called the Jaks-STATs pathway. Activated proteins in the Jaks-STATs pathway bind to gamma activation site “GAS” elements or interferon-sensitive responsive element (“ISRE”), located in the promoter of many genes. The binding of a protein to these elements alter the expression of the associated gene.

[2341] GAS and ISRE elements are recognized by a class of transcription factors called Signal Transducers and Activators of Transcription, or “STATs.” There are six members of the STATs family. Stat1 and Stat3 are present in many cell types, as is Stat2 (as response to IFN-alpha is widespread). Stat4 is more restricted and is not in many cell types though it has been found in T helper class I, cells after treatment with IL-12. Stat5 was originally called mammary growth factor, but has been found at higher concentrations in other cells including myeloid cells. It can be activated in tissue culture cells by many cytokines.

[2342] The STATs are activated to translocate from the cytoplasm to the nucleus upon tyrosine phosphorylation by a set of kinases known as the Janus Kinase (“Jaks”) family. Jaks represent a distinct family of soluble tyrosine kinases and include Tyk2, Jak1, Jak2, and Jak3. These kinases display significant sequence similarity and are generally catalytically inactive in resting cells.

[2343] The Jaks are activated by a wide range of receptors summarized in the Table below. (Adapted from review by Schidler and Darnell, Ann. Rev. Biochem. 64:621-51 (1995).) A cytokine receptor family, capable of activating Jaks, is divided into two groups: (a) Class 1 includes receptors for IL-2, IL-3, IL-4, IL-6, IL-7, IL-9, IL-11, IL-12, IL-15, Epo, PRL, GH, G-CSF, GM-CSF, LIF, CNTF, and thrombopoietin; and (b) Class 2 includes IFN-a, IFN-g, and IL-10. The Class 1 receptors share a conserved cysteine motif (a set of four conserved cysteines and one tryptophan) and a WSXWS motif (a membrane proximal region encoding Trp-Ser-Xxx-Trp-Ser (SEQ ID NO:2)).

[2344] Thus, on binding of a ligand to a receptor, Jaks are activated, which in turn activate STATs, which then translocate and bind to GAS elements. This entire process is encompassed in the Jaks-STATs signal transduction pathway.

[2345] Therefore, activation of the Jaks-STATs pathway, reflected by the binding of the GAS or the ISRE element, can be used to indicate proteins involved in the proliferation and differentiation of cells. For example, growth factors and cytokines are known to activate the Jaks-STATs pathway. (See Table below.) Thus, by using GAS elements linked to reporter molecules, activators of the Jaks-STATs pathway can be identified.

| JAKs | | | | | | |
|---|---|---|---|---|---|---|
| Ligand | tyk2 | Jak1 | Jak2 | Jak3 | STATS | GAS(elements) or ISRE |
| IFN family | | | | | | |
| IFN-a/B | + | + | − | − | 1, 2, 3 | ISRE |
| IFN-g | | + | + | − | 1 | GAS (IRF1 > Lys6 > IFP) |
| Il-10 | + | ? | ? | − | 1, 3 | |
| gp130 family | | | | | | |
| IL-6(Pleiotrophic) | + | + | + | ? | 1, 3 | GAS (IRF1 > Lys6 > IFP) |
| Il-11(Pleiotrophic) | ? | + | ? | ? | 1, 3 | |
| OnM(Pleiotrophic) | ? | + | + | ? | 1, 3 | |
| LIF(Pleiotrophic) | ? | + | + | ? | 1, 3 | |
| CNTF(Pleiotrophic) | −/+ | + | + | ? | 1, 3 | |
| G-CSF(Pleiotrophic) | ? | + | ? | ? | 1, 3 | |
| IL-12(Pleiotrophic) | + | − | + | + | 1, 3 | |
| g-C family | | | | | | |
| IL-2 (lymphocytes) | − | + | − | + | 1, 3, 5 | GAS |
| IL-4 (lymph/myeloid) | − | + | − | + | 6 | GAS (IRF1 = IFP >> Ly6)(IgH) |
| IL-7 (lymphocytes) | − | + | − | + | 5 | GAS |
| IL-9 (lymphocytes) | − | + | − | + | 5 | GAS |
| IL-13 (lymphocyte) | − | + | ? | ? | 6 | GAS |
| IL-15 | ? | + | ? | + | 5 | GAS |
| gp140 family | | | | | | |
| IL-3 (myeloid) | − | − | + | − | 5 | GAS (IRF1 > IFP >> Ly6) |
| IL-5 (myeloid) | − | − | + | − | 5 | GAS |
| GM-CSF (myeloid) | − | − | + | − | 5 | GAS |
| Growth hormone family | | | | | | |
| GH | ? | − | + | − | 5 | |
| PRL | ? | +/− | + | − | 1, 3, 5 | |
| EPO | ? | − | + | − | 5 | GAS(B-CAS > IRF1 = IFP >> Ly6) |
| Receptor Tyrosine Kinases | | | | | | |
| EGF | ? | + | + | − | 1, 3 | GAS (IRF1) |
| PDGF | ? | + | + | − | 1, 3 | |
| CSF-1 | ? | + | + | − | 1, 3 | GAS (not IRF1) |

[2346] To construct a synthetic GAS containing promoter element, which is used in the Biological Assays described in Examples 13-14, a PCR based strategy is employed to generate a GAS-SV40 promoter sequence. The 5′ primer contains four tandem copies of the GAS binding site found in the IRF1 promoter and previously demonstrated to bind STATs upon induction with a range of cytokines (Rothman et al., Inmunity 1:457-468 (1994).), although other GAS or ISRE elements can be used instead. The 5′ primer also contains 18 bp of sequence complementary to the SV40 early promoter sequence and is flanked with an XhoI site. The sequence of the 5′ primer is:

(SEQ ID NO:3)

5′:GCGCCTCGAGATTTCCCCGAAATCTAGATTTCCCCGAAATGATTTCC
CCGAAATGATTTCCCCGAAATATCTGCCATCTCAATTAG:3′

[2347] The downstream primer is complementary to the SV40 promoter and is flanked with a Hind III site: 5′:GCGGCAAGCTTTTTGCAAAGCCTAGGC:3′ (SEQ ID NO:4)

[2348] PCR amplification is performed using the SV40 promoter template present in the B-gal:promoter plasmid obtained from Clontech. The resulting PCR fragment is digested with XhoI/Hind III and subcloned into BLSK2-. (Stratagene.) Sequencing with forward and reverse primers confirms that the insert contains the following sequence:

(SEQ ID NO:5)

5′:CTCGAGATTTCCCCGAAATCTAGATTTCCCCGAAATGATTTCCCCGA
AATGATTTCCCCGAAATATCTGCCATCTCAATTAGTCAGCAACCATAGTC
CCGCCCCTAACTCCGCCCATCCCGCCCCTAACTCCGCCCAGTTCCGCCCA
TTCTCCGCCCCATGGCTGACTAATTTTTTTTATTTATGCAGAGGCCGAGG
CCGCCTCGGCCTCTGAGCTATTCCAGAAGTAGTGAGGAGGCTTTTTTGGA
GGCCTAGGCTTTTGCAAAAAGCTT:3′

[2349] With this GAS promoter element linked to the SV40 promoter, a GAS:SEAP2 reporter construct is next engineered. Here, the reporter molecule is a secreted alkaline phosphatase, or “SEAP.” Clearly, however, any reporter molecule can be instead of SEAP, in this or in any of the other Examples. Well known reporter molecules that can be used instead of SEAP include chloramphenicol acetyltransferase (CAT), luciferase, alkaline phosphatase, B-galactosidase, green fluorescent protein (GFP), or any protein detectable by an antibody.

[2350] The above sequence confirmed synthetic GAS-SV40 promoter element is subcloned into the pSEAP-Promoter vector obtained from Clontech using HindIII and XhoI, effectively replacing the SV40 promoter with the amplified GAS:SV40 promoter element, to create the GAS-SEAP vector. However, this vector does not contain a neomycin resistance gene, and therefore, is not preferred for mammalian expression systems.

[2351] Thus, in order to generate mammalian stable cell lines expressing the GAS-SEAP reporter, the GAS-SEAP cassette is removed from the GAS-SEAP vector using SalI and NotI, and inserted into a backbone vector containing the neomycin resistance gene, such as pGFP-1 (Clontech), using these restriction sites in the multiple cloning site, to create the GAS-SEAP/Neo vector. Once this vector is transfected into mammalian cells, this vector can then be used as a reporter molecule for GAS binding as described in Examples 13-14.

[2352] Other constructs can be made using the above description and replacing GAS with a different promoter sequence. For example, construction of reporter molecules containing NFK-B and EGR promoter sequences are described in Examples 15 and 16. However, many other promoters can be substituted using the protocols described in these Examples. For instance, SRE, IL-2, NFAT, or Osteocalcin promoters can be substituted, alone or in combination (e.g., GAS/NF-KB/EGR, GAS/NF-KB, Il-2/NFAT, or NF-KB/GAS). Similarly, other cell lines can be used to test reporter construct activity, such as HELA (epithelial), HUVEC (endothelial), Reh (B-cell), Saos-2 (osteoblast), HUVAC (aortic), or Cardiomyocyte.

### Example 13

### High-Throughput Screening Assay for T-Cell Activity

[2353] The following protocol is used to assess T-cell activity by identifying factors, and determining whether supernate containing a polypeptide of the invention proliferates and/or differentiates T-cells. T-cell activity is assessed using the GAS/SEAP/Neo construct produced in Example 12. Thus, factors that increase SEAP activity indicate the ability to activate the Jaks-STATS signal transduction pathway. The T-cell used in this assay is Jurkat T-cells (ATCC Accession No. TIB-152), although Molt-3 cells (ATCC Accession No. CRL-1552) and Molt-4 cells (ATCC Accession No. CRL-1582) cells can also be used.

[2354] Jurkat T-cells are lymphoblastic CD4⁺ Th1 helper cells. In order to generate stable cell lines, approximately 2 million Jurkat cells are transfected with the GAS-SEAP/neo vector using DMRIE-C (Life Technologies)(transfection procedure described below). The transfected cells are seeded to a density of approximately 20,000 cells per well and transfectants resistant to 1 mg/ml genticin selected. Resistant colonies are expanded and then tested for their response to increasing concentrations of interferon gamma. The dose response of a selected clone is demonstrated.

[2355] Specifically, the following protocol will yield sufficient cells for 75 wells containing 200 ul of cells. Thus, it is either scaled up, or performed in multiple to generate sufficient cells for multiple 96 well plates. Jurkat cells are maintained in RPMI+10% serum with 1%Pen-Strep. Combine 2.5 mls of OPTI-MEM (Life Technologies) with 10 ug of plasmid DNA in a T25 flask. Add 2.5 ml OPTI-MEM containing 50 ul of DMRIE-C and incubate at room temperature for 15-45 mins.

[2356] During the incubation period, count cell concentration, spin down the required number of cells (10⁷ per transfection), and resuspend in OPTI-MEM to a final concentration of 10⁷ cells/ml. Then add 1 ml of 1×10⁷ cells in OPTI-MEM to T25 flask and incubate at 37 degrees C. for 6 hrs. After the incubation, add 10 ml of RPMI+15% serum.

[2357] The Jurkat:GAS-SEAP stable reporter lines are maintained in RPMI+10% serum, 1 mg/ml Genticin, and 1% Pen-Strep. These cells are treated with supernatants containing polypeptides of the invention and/or induced polypeptides of the invention as produced by the protocol described in Example 11.

[2358] On the day of treatment with the supernatant, the cells should be washed and resuspended in fresh RPMI+10% serum to a density of 500,000 cells per ml. The exact number of cells required will depend on the number of supernatants being screened. For one 96 well plate, approximately 10 million cells (for 10 plates, 100 million cells) are required.

[2359] Transfer the cells to a triangular reservoir boat, in order to dispense the cells into a 96 well dish, using a 12 channel pipette. Using a 12 channel pipette, transfer 200 ul of cells into each well (therefore adding 100, 000 cells per well).

[2360] After all the plates have been seeded, 50 ul of the supernatants are transferred directly from the 96 well plate containing the supernatants into each well using a 12 channel pipette. In addition, a dose of exogenous interferon gamma (0.1, 1.0, 10 ng) is added to wells H9, H10, and H11 to serve as additional positive controls for the assay.

[2361] The 96 well dishes containing Jurkat cells treated with supernatants are placed in an incubator for 48 hrs (note: this time is variable between 48-72 hrs). 35 ul samples from each well are then transferred to an opaque 96 well plate using a 12 channel pipette. The opaque plates should be covered (using sellophene covers) and stored at −20 degrees C. until SEAP assays are performed according to Example 17. The plates containing the remaining treated cells are placed at 4 degrees C. and serve as a source of material for repeating the assay on a specific well if desired.

[2362] As a positive control, 100 Unit/ml interferon gamma can be used which is known to activate Jurkat T cells. Over 30 fold induction is typically observed in the positive control wells.

[2363] The above protocol may be used in the generation of both transient, as well as, stable transfected cells, which would be apparent to those of skill in the art.

### Example 14

### High-Throughput Screening Assay Identifying Myeloid Activity

[2364] The following protocol is used to assess myeloid activity by determining whether polypeptides of the invention proliferates and/or differentiates myeloid cells. Myeloid cell activity is assessed using the GAS/SEAP/Neo construct produced in Example 12. Thus, factors that increase SEAP activity indicate the ability to activate the Jaks-STATS signal transduction pathway. The myeloid cell used in this assay is U937, a pre-monocyte cell line, although TF-1, HL60, or KG1 can be used.

[2365] To transiently transfect U937 cells with the GAS/SEAP/Neo construct produced in Example 12, a DEAE-Dextran method (Kharbanda et. al., 1994, Cell Growth & Differentiation, 5:259-265) is used. First, harvest 2×10e⁷ U937 cells and wash with PBS. The U937 cells are usually grown in RPMI 1640 medium containing 10% heat-inactivated fetal bovine serum (FBS) supplemented with 100 units/ml penicillin and 100 mg/ml streptomycin.

[2366] Next, suspend the cells in 1 ml of 20 mM Tris-HCl (pH 7.4) buffer containing 0.5 mg/ml DEAE-Dextran, 8 ug GAS-SEAP2 plasmid DNA, 140 mM NaCl, 5 mM KCl, 375 uM Na₂HPO₄.7H₂O, 1 mM MgCl₂, and 675 uM CaCl₂. Incubate at 37 degrees C. for 45 min.

[2367] Wash the cells with RPMI 1640 medium containing 10% FBS and then resuspend in 10 ml complete medium and incubate at 37 degrees C. for 36 hr.

[2368] The GAS-SEAP/U937 stable cells are obtained by growing the cells in 400 ug/ml G418. The G418-free medium is used for routine growth but every one to two months, the cells should be re-grown in 400 ug/ml G418 for couple of passages.

[2369] These cells are tested by harvesting 1×10⁸ cells (this is enough for ten 96-well plates assay) and wash with PBS. Suspend the cells in 200 ml above described growth medium, with a final density of 5×10⁵ cells/ml. Plate 200 ul cells per well in the 96-well plate (or 1×10⁵ cells/well).

[2370] Add 50 ul of the supernatant prepared by the protocol described in Example 11. Incubate at 37 degrees C. for 48 to 72 hr. As a positive control, 100 Unit/ml interferon gamma can be used which is known to activate U937 cells. Over 30 fold induction is typically observed in the positive control wells. SEAP assay the supernatant according to the protocol described in Example 17.

### Example 15

### High-Throughput Screening Assay Identifying Neuronal Activity.

[2371] When cells undergo differentiation and proliferation, a group of genes are activated through many different signal transduction pathways. One of these genes, EGR1 (early growth response gene 1), is induced in various tissues and cell types upon activation. The promoter of EGR1 is responsible for such induction. Using the EGR1 promoter linked to reporter molecules, activation of cells can be assessed.

[2372] Particularly, the following protocol is used to assess neuronal activity in PC12 cell lines. PC12 cells (rat phenochromocytoma cells) are known to proliferate and/or differentiate by activation with a number of mitogens, such as TPA (tetradecanoyl phorbol acetate), NGF (nerve growth factor), and EGF (epidermal growth factor). The EGR1 gene expression is activated during this treatment. Thus, by stably transfecting PC12 cells with a construct containing an EGR promoter linked to SEAP reporter, activation of PC12 cells can be assessed.

[2373] The EGR/SEAP reporter construct can be assembled by the following protocol. The EGR-1 promoter sequence (−633 to +1)(Sakamoto K et al., Oncogene 6:867-871 (1991)) can be PCR amplified from human genomic DNA using the following primers:

[2374] 5′ GCGCTCGAGGGATGACAGCGATAGAACCCCGG-3′ (SEQ ID NO:6)

[2375] 5′ GCGAAGCTTCGCGACTCCCCGGATCCGCCTC-3′ (SEQ ID NO:7)

[2376] Using the GAS:SEAP/Neo vector produced in Example 12, EGR1 amplified product can then be inserted into this vector. Linearize the GAS:SEAP/Neo vector using restriction enzymes XhoI/HindIII, removing the GAS/SV40 stuffer. Restrict the EGR1 amplified product with these same enzymes. Ligate the vector and the EGR1 promoter.

[2377] To prepare 96 well-plates for cell culture, two mls of a coating solution (1:30 dilution of collagen type I (Upstate Biotech Inc. Cat#08-115) in 30% ethanol (filter sterilized)) is added per one 10 cm plate or 50 ml per well of the 96-well plate, and allowed to air dry for 2 hr.

[2378] PC12 cells are routinely grown in RPMI-1640 medium (Bio Whittaker) containing 10% horse serum (JRH BIOSCIENCES, Cat. # 12449-78P), 5% heat-inactivated fetal bovine serum (FBS) supplemented with 100 units/ml penicillin and 100 ug/ml streptomycin on a precoated 10 cm tissue culture dish. One to four split is done every three to four days. Cells are removed from the plates by scraping and resuspended with pipetting up and down for more than 15 times.

[2379] Transfect the EGR/SEAP/Neo construct into PC12 using the Lipofectamine protocol described in Example 11. EGR-SEAP/PC12 stable cells are obtained by growing the cells in 300 ug/ml G418. The G418-free medium is used for routine growth but every one to two months, the cells should be re-grown in 300 ug/ml G418 for couple of passages.

[2380] To assay for neuronal activity, a 10 cm plate with cells around 70 to 80% confluent is screened by removing the old medium. Wash the cells once with PBS (Phosphate buffered saline). Then starve the cells in low serum medium (RPMI-1640 containing 1% horse serum and 0.5% FBS with antibiotics) overnight.

[2381] The next morning, remove the medium and wash the cells with PBS. Scrape off the cells from the plate, suspend the cells well in 2 ml low serum medium. Count the cell number and add more low serum medium to reach final cell density as 5×10⁵ cells/ml.

[2382] Add 200 ul of the cell suspension to each well of 96-well plate (equivalent to 1×10⁵ cells/well). Add 50 ul supernatant produced by Example 11, 37° C. for 48 to 72 hr. As a positive control, a growth factor known to activate PC12 cells through EGR can be used, such as 50 ng/ul of Neuronal Growth Factor (NGF). Over fifty-fold induction of SEAP is typically seen in the positive control wells. SEAP assay the supernatant according to Example 17.

### Example 16

### High-Throughput Screening Assay for T-Cell Activity

[2383] NF-KB (Nuclear Factor KB) is a transcription factor activated by a wide variety of agents including the inflammatory cytokines IL-1 and TNF, CD30 and CD40, lymphotoxin-alpha and lymphotoxin-beta, by exposure to LPS or thrombin, and by expression of certain viral gene products. As a transcription factor, NF-KB regulates the expression of genes involved in immune cell activation, control of apoptosis (NF-KB appears to shield cells from apoptosis), B and T-cell development, anti-viral and antimicrobial responses, and multiple stress responses.

[2384] In non-stimulated conditions, NF-KB is retained in the cytoplasm with I-KB (Inhibitor KB). However, upon stimulation, I-KB is phosphorylated and degraded, causing NF-KB to shuttle to the nucleus, thereby activating transcription of target genes. Target genes activated by NF-KB include IL-2, IL-6, GM-CSF, ICAM-1 and class 1 MHC.

[2385] Due to its central role and ability to respond to a range of stimuli, reporter constructs utilizing the NF-KB promoter element are used to screen the supernatants produced in Example 11. Activators or inhibitors of NF-KB would be useful in treating diseases. For example, inhibitors of NF-KB could be used to treat those diseases related to the acute or chronic activation of NF-KB, such as rheumatoid arthritis.

[2386] To construct a vector containing the NF-KB promoter element, a PCR based strategy is employed. The upstream primer contains four tandem copies of the NF-KB binding site (GGGGACTTTCCC) (SEQ ID NO:8), 18 bp of sequence complementary to the 5′ end of the SV40 early promoter sequence, and is flanked with an XhoI site:

(SEQ ID NO:9)

5′:GCGGCCTCGAGGGGACTTTCCCGGGGACTTTCCGGGGACTTTCCGGG
ACTTTCCATCCTGCCATCTCAATTAG:3′

[2387] The downstream primer is complementary to the 3′ end of the SV40 promoter and is flanked with a Hind IU site:

[2388] 5′:GCGGCAAGCTTTTTGCAAAGCCTAGGC:3′ (SEQ ID NO:4)

[2389] PCR amplification is performed using the SV40 promoter template present in the pB-gal:promoter plasmid obtained from Clontech. The resulting PCR fragment is digested with XhoI and Hind III and subcloned into BLSK2-. (Stratagene) Sequencing with the T7 and T3 primers confirms the insert contains the following sequence:

(SEQ ID NO:10)

5′:CTCGAGGGGACTTTCCCGGGGACTTTCCGGGGACTTTCCGGGACTTT
CCATCTGCCATCTCAATTAGTCAGCAACCATAGTCCCGCCCCTAACTCCG
CCCATCCCGCCCCTAACTCCGCCCAGTTCCGCCCATTCTCCGCCCCATGG
CTGACTAATTTTTTTTATTTATGCAGAGGCCGAGGCCGCCTCGGCCTCTG
AGCTATTCCAGAAGTAGTGAGGAGGCTTTTTTGGAGGCCTAGGCTTTTGC
AAAAAGCTT:3′

[2390] Next, replace the SV40 minimal promoter element present in the pSEAP2-promoter plasmid (Clontech) with this NF-KB/SV40 fragment using XhoI and HindIII. However, this vector does not contain a neomycin resistance gene, and therefore, is not preferred for mammalian expression systems.

[2391] In order to generate stable mammalian cell lines, the NF-KB/SV40/SEAP cassette is removed from the above NF-KB/SEAP vector using restriction enzymes SalI and NotI, and inserted into a vector containing neomycin resistance. Particularly, the NF-KB/SV40/SEAP cassette was inserted into pGFP-1 (Clontech), replacing the GFP gene, after restricting pGFP-1 with SalI and NotI.

[2392] Once NF-KB/SV40/SEAP/Neo vector is created, stable Jurkat T-cells are created and maintained according to the protocol described in Example 13. Similarly, the method for assaying supernatants with these stable Jurkat T-cells is also described in Example 13. As a positive control, exogenous TNF alpha (0.1,1, 10 ng) is added to wells H9, H10, and H11, with a 5-10 fold activation typically observed.

### Example 17

### Assay for SEAP Activity

[2393] As a reporter molecule for the assays described in Examples 13-16, SEAP activity is assayed using the Tropix Phospho-light Kit (Cat. BP-400) according to the following general procedure. The Tropix Phospho-light Kit supplies the Dilution, Assay, and Reaction Buffers used below.

[2394] Prime a dispenser with the 2.5×Dilution Buffer and dispense 15 ul of 2.5×dilution buffer into Optiplates containing 35 ul of a supernatant. Seal the plates with a plastic sealer and incubate at 65 degree C. for 30 min. Separate the Optiplates to avoid uneven heating.

[2395] Cool the samples to room temperature for 15 minutes. Empty the dispenser and prime with the Assay Buffer. Add 50 ml Assay Buffer and incubate at room temperature 5 min. Empty the dispenser and prime with the Reaction Buffer (see the table below). Add 50 ul Reaction Buffer and incubate at room temperature for 20 minutes. Since the intensity of the chemiluminescent signal is time dependent, and it takes about 10 minutes to read 5 plates on luminometer, one should treat 5 plates at each time and start the second set 10 minutes later.

[2396] Read the relative light unit in the luminometer. Set H12 as blank, and print the results. An increase in chemiluminescence indicates reporter activity.

Reaction Buffer Formulation:

| # of | Rxn buffer diluent | CSPD |
|---|---|---|
| plates | (ml) | (ml) |
| 10 | 60 | 3 |
| 11 | 65 | 3.25 |
| 12 | 70 | 3.5 |
| 13 | 75 | 3.75 |
| 14 | 80 | 4 |
| 15 | 85 | 4.25 |
| 16 | 90 | 4.5 |
| 17 | 95 | 4.75 |
| 18 | 100 | 5 |
| 19 | 105 | 5.25 |
| 20 | 110 | 5.5 |
| 21 | 115 | 5.75 |
| 22 | 120 | 6 |
| 23 | 125 | 6.25 |
| 24 | 130 | 6.5 |
| 25 | 135 | 6.75 |
| 26 | 140 | 7 |
| 27 | 145 | 7.25 |
| 28 | 150 | 7.5 |
| 29 | 155 | 7.75 |
| 30 | 160 | 8 |
| 31 | 165 | 8.25 |
| 32 | 170 | 8.5 |
| 33 | 175 | 8.75 |
| 34 | 180 | 9 |
| 35 | 185 | 9.25 |
| 36 | 190 | 9.5 |
| 37 | 195 | 9.75 |
| 38 | 200 | 10 |
| 39 | 205 | 10.25 |
| 40 | 210 | 10.5 |
| 41 | 215 | 10.75 |
| 42 | 220 | 11 |
| 43 | 225 | 11.25 |
| 44 | 230 | 11.5 |
| 45 | 235 | 11.75 |
| 46 | 240 | 12 |
| 47 | 245 | 12.25 |
| 48 | 250 | 12.5 |
| 49 | 255 | 12.75 |
| 50 | 260 | 13 |

### Example 18

### High-Throughput Screening Assay Identifying Changes in Molecule Concentration and Membrane Permeability

[2397] Binding of a ligand to a receptor is known to alter intracellular levels of small molecules, such as calcium, potassium, sodium, and pH, as well as alter membrane potential. These alterations can be measured in an assay to identify supernatants which bind to receptors of a particular cell. Although the following protocol describes an assay for calcium, this protocol can easily be modified to detect changes in potassium, sodium, pH, membrane potential, or any other small molecule which is detectable by a fluorescent probe.

[2398] The following assay uses Fluorometric Imaging Plate Reader (“FLIPR”) to measure changes in fluorescent molecules (Molecular Probes) that bind small molecules. Clearly, any fluorescent molecule detecting a small molecule can be used instead of the calcium fluorescent molecule, fluo-4 (Molecular Probes, Inc.; catalog no. F-14202), used here.

[2399] For adherent cells, seed the cells at 10,000-20,000 cells/well in a Co-star black 96-well plate with clear bottom. The plate is incubated in a CO₂ incubator for 20 hours. The adherent cells are washed two times in Biotek washer with 200 ul of HBSS (Hank's Balanced Salt Solution) leaving 100 ul of buffer after the final wash.

[2400] A stock solution of 1 mg/ml fluo-4 is made in 10% pluronic acid DMSO. To load the cells with fluo-4, 50 ul of 12 ug/ml fluo-4 is added to each well. The plate is incubated at 37 degrees C. in a CO₂ incubator for 60 min. The plate is washed four times in the Biotek washer with HBSS leaving 100 ul of buffer.

[2401] For non-adherent cells, the cells are spun down from culture media. Cells are re-suspended to 2-5×10⁶ cells/ml with HBSS in a 50-ml conical tube. 4 ul of 1 mg/ml fluo-4 solution in 10% pluronic acid DMSO is added to each ml of cell suspension. The tube is then placed in a 37 degrees C. water bath for 30-60 min. The cells are washed twice with HBSS, resuspended to 1×10⁶ cells/ml, and dispensed into a microplate, 100 ul/well. The plate is centrifuged at 1000 rpm for 5 min. The plate is then washed once in Denley CellWash with 200 ul, followed by an aspiration step to 100 ul final volume.

[2402] For a non-cell based assay, each well contains a fluorescent molecule, such as fluo-4. The supernatant is added to the well, and a change in fluorescence is detected.

[2403] To measure the fluorescence of intracellular calcium, the FLIPR is set for the following parameters: (1) System gain is 300-800 mW; (2) Exposure time is 0.4 second; (3) Camera F/stop is F/2; (4) Excitation is 488 nm; (5) Emission is 530 nm; and (6) Sample addition is 50 ul. Increased emission at 530 nm indicates an extracellular signaling event which has resulted in an increase in the intracellular Ca⁺⁺ concentration.

### Example 19

### High-Throughput Screening Assay Identifying Tyrosine Kinase Activity

[2404] The Protein Tyrosine Kinases (PTK) represent a diverse group of transmembrane and cytoplasmic kinases. Within the Receptor Protein Tyrosine Kinase RPTK) group are receptors for a range of mitogenic and metabolic growth factors including the PDGF, FGF, EGF, NGF, HGF and Insulin receptor subfamilies. In addition there are a large family of RPTKs for which the corresponding ligand is unknown. Ligands for RPTKs include mainly secreted small proteins, but also membrane-bound and extracellular matrix proteins.

[2405] Activation of RPTK by ligands involves ligand-mediated receptor dimerization, resulting in transphosphorylation of the receptor subunits and activation of the cytoplasmic tyro sine kinases. The cytoplasmic tyro sine kinases include receptor associated tyrosine kinases of the src-family (e.g., src, yes, Ick, lyn, fyn) and non-receptor linked and cytosolic protein tyrosine kinases, such as the Jak family, members of which mediate signal transduction triggered by the cytokine superfamily of receptors (e.g., the Interleukins, Interferons, GM-CSF, and Leptin).

[2406] Because of the wide range of known factors capable of stimulating tyrosine kinase activity, the identification of novel human secreted proteins capable of activating tyrosine kinase signal transduction pathways are of interest. Therefore, the following protocol is designed to identify those novel human secreted proteins capable of activating the tyrosine kinase signal transduction pathways.

[2407] Seed target cells (e.g., primary keratinocytes) at a density of approximately 25,000 cells per well in a 96 well Loprodyne Silent Screen Plates purchased from Nalge Nunc (Naperville, Ill.). The plates are sterilized with two 30 minute rinses with 100% ethanol, rinsed with water and dried overnight. Some plates are coated for 2 hr with 100 ml of cell culture grade type I collagen (50 mg/ml), gelatin (2%) or polylysine (50 mg/ml), all of which can be purchased from Sigma Chemicals (St. Louis, Mo.) or 10% Matrigel purchased from Becton Dickinson (Bedford, Mass.), or calf serum, rinsed with PBS and stored at 4 degree C. Cell growth on these plates is assayed by seeding 5,000 cells/well in growth medium and indirect quantitation of cell number through use of alamarBlue as described by the manufacturer Alamar Biosciences, Inc. (Sacramento, Calif.) after 48 hr. Falcon plate covers #3071 from Becton Dickinson (Bedford, Mass.) are used to cover the Loprodyne Silent Screen Plates. Falcon Microtest III cell culture plates can also be used in some proliferation experiments.

[2408] To prepare extracts, A431 cells are seeded onto the nylon membranes of Loprodyne plates (20,000/200 ml/well) and cultured overnight in complete medium. Cells are quiesced by incubation in serum-free basal medium for 24 hr. After 5-20 minutes treatment with EGF (60 ng/ml) or 50 ul of the supernatant produced in Example 11, the medium was removed and 100 ml of extraction buffer ((20 mM HEPES pH 7.5, 0.15 M NaCl, 1% Triton X-100, 0.1% SDS, 2 mM Na3VO4, 2 mM Na4P2O7 and a cocktail of protease inhibitors (# 1836170) obtained from Boeheringer Mannheim (Indianapolis, Ind.) is added to each well and the plate is shaken on a rotating shaker for 5 minutes at 4 degrees C. The plate is then placed in a vacuum transfer manifold and the extract filtered through the 0.45 mm membrane bottoms of each well using house vacuum. Extracts are collected in a 96-well catch/assay plate in the bottom of the vacuum manifold and immediately placed on ice. To obtain extracts clarified by centrifugation, the content of each well, after detergent solubilization for 5 minutes, is removed and centrifuged for 15 minutes at 4 degrees C. at 16,000×g.

[2409] Test the filtered extracts for levels of tyrosine kinase activity. Although many methods of detecting tyrosine kinase activity are known, one method is described here.

[2410] Generally, the tyrosine kinase activity of a supernatant is evaluated by determining its ability to phosphorylate a tyrosine residue on a specific substrate (a biotinylated peptide). Biotinylated peptides that can be used for this purpose include PSK1 (corresponding to amino acids 6-20 of the cell division kinase cdc2-p34) and PSK2 (corresponding to amino acids 1-17 of gastrin). Both peptides are substrates for a range of tyrosine kinases and are available from Boehringer Mannheim.

[2411] The tyrosine kinase reaction is set up by adding the following components in order. First, add 10 ul of 5 uM Biotinylated Peptide, then 10 ul ATP/Mg₂₊ (5 mM ATP/50 mM MgCl₂), then 10 ul of 5×Assay Buffer (40 mM imidazole hydrochloride, pH 7.3, 40 mM beta-glycerophosphate, 1 mM EGTA, 100 mM MgCl2, 5 mM MnCl₂, 0.5 mg/ml BSA), then 5 ul of Sodium Vanadate (1 mM), and then 5 ul of water. Mix the components gently and preincubate the reaction mix at 30 degrees C. for 2 min. Initial the reaction by adding 10 ul of the control enzyme or the filtered supernatant.

[2412] The tyrosine kinase assay reaction is then terminated by adding 10 ul of 120 mm EDTA and place the reactions on ice.

[2413] Tyrosine kinase activity is determined by transferring 50 ul aliquot of reaction mixture to a microtiter plate (MTP) module and incubating at 37 degrees C. for 20 min. This allows the streptavadin coated 96 well plate to associate with the biotinylated peptide. Wash the MTP module with 300 ul/well of PBS four times. Next add 75 ul of anti-phospolyrosine antibody conjugated to horse radish peroxidase (anti-P-Tyr-POD (0.5 u/ml)) to each well and incubate at 37 degrees C. for one hour. Wash the well as above.

[2414] Next add 100 ul of peroxidase substrate solution (Boehringer Mannheim) and incubate at room temperature for at least 5 mins (up to 30 min). Measure the absorbance of the sample at 405 nm by using ELISA reader. The level of bound peroxidase activity is quantitated using an ELISA reader and reflects the level of tyrosine kinase activity.

### Example 20

### High-Throughput Screening Assay Identifying Phosphorylation Activity

[2415] As a potential alternative and/or compliment to the assay of protein tyrosine kinase activity described in Example 19, an assay which detects activation (phosphorylation) of major intracellular signal transduction intermediates can also be used. For example, as described below one particular assay can detect tyrosine phosphorylation of the Erk-1 and Erk-2 kinases. However, phosphorylation of other molecules, such as Raf, JNK, p38 MAP, Map kinase kinase (MEK), MEK kinase, Src, Muscle specific kinase (MuSK), IRAK, Tec, and Janus, as well as any other phosphoserine, phosphotyrosine, or phosphothreonine molecule, can be detected by substituting these molecules for Erk-1 or Erk-2 in the following assay.

[2416] Specifically, assay plates are made by coating the wells of a 96-well ELISA plate with 0.1 ml of protein G (1 ug/ml) for 2 hr at room temp, (RT). The plates are then rinsed with PBS and blocked with 3% BSA/PBS for 1 hr at RT. The protein G plates are then treated with 2 commercial monoclonal antibodies (100 ng/well) against Erk-1 and Erk-2 (1 hr at RT) (Santa Cruz Biotechnology). (To detect other molecules, this step can easily be modified by substituting a monoclonal antibody detecting any of the above described molecules.) After 3-5 rinses with PBS, the plates are stored at 4 degrees C. until use.

[2417] A431 cells are seeded at 20,000/well in a 96-well Loprodyne filterplate and cultured overnight in growth medium. The cells are then starved for 48 hr in basal medium (DMEM) and then treated with EGF (6 ng/well) or 50 ul of the supernatants obtained in Example 11 for 5-20 minutes. The cells are then solubilized and extracts filtered directly into the assay plate.

[2418] After incubation with the extract for 1 hr at RT, the wells are again rinsed. As a positive control, a commercial preparation of MAP kinase (10 ng/well) is used in place of A431 extract. Plates are then treated with a commercial polyclonal (rabbit) antibody (1 ug/ml) which specifically recognizes the phosphorylated epitope of the Erk-1 and Erk-2 kinases (1 hr at RT). This antibody is biotinylated by standard procedures. The bound polyclonal antibody is then quantitated by successive incubations with Europium-streptavidin and Europium fluorescence enhancing reagent in the Wallac DELFIA instrument (time-resolved fluorescence). An increased fluorescent signal over background indicates a phosphorylation.

### Example 21

### Method of Determining Alterations in a Gene Corresponding to a Polynucleotide

[2419] RNA isolated from entire families or individual patients presenting with a phenotype of interest (such as a disease) is be isolated. cDNA is then generated from these RNA samples using protocols known in the art. (See, Sambrook.) The cDNA is then used as a template for PCR, employing primers surrounding regions of interest in SEQ ID NO:X. Suggested PCR conditions consist of 35 cycles at 95 degrees C. for 30 seconds; 60-120 seconds at 52-58 degrees C.; and 60-120 seconds at 70 degrees C., using buffer solutions described in Sidransky et al., Science 252:706 (1991).

[2420] PCR products are then sequenced using primers labeled at their 5′ end with T4 polynucleotide kinase, employing SequiTherm Polymerase. (Epicentre Technologies). The intron-exon borders of selected exons is also determined and genomic PCR products analyzed to confirm the results. PCR products harboring suspected mutations is then cloned and sequenced to validate the results of the direct sequencing.

[2421] PCR products is cloned into T-tailed vectors as described in Holton et al., Nucleic Acids Research, 19:1156 (1991) and sequenced with T7 polymerase (United States Biochemical). Affected individuals are identified by mutations not present in unaffected individuals.

[2422] Genomic rearrangements are also observed as a method of determining alterations in a gene corresponding to a polynucleotide. Genomic clones isolated according to Example 2 are nick-translated with digoxigenindeoxy-uridine 5′-triphosphate (Boehringer Manheim), and FISH performed as described in Johnson et al., Methods Cell Biol. 35:73-99 (1991). Hybridization with the labeled probe is carried out using a vast excess of human cot-1 DNA for specific hybridization to the corresponding genomic locus.

[2423] Chromosomes are counterstained with 4,6-diamino-2-phenylidole and propidium iodide, producing a combination of C- and R-bands. Aligned images for precise mapping are obtained using a triple-band filter set (Chroma Technology, Brattleboro, Vt.) in combination with a cooled charge-coupled device camera (Photometrics, Tucson, Ariz.) and variable excitation wavelength filters. (Johnson et al., Genet. Anal. Tech. Appl., 8:75 (1991).) Image collection, analysis and chromosomal fractional length measurements are performed using the ISee Graphical Program System. (Inovision Corporation, Durham, N.C.) Chromosome alterations of the genomic region hybridized by the probe are identified as insertions, deletions, and translocations. These alterations are used as a diagnostic marker for an associated disease.

### Example 22

### Method of Detecting Abnormal Levels of a Polypeptide in a Biological Sample

[2424] A polypeptide of the present invention can be detected in a biological sample, and if an increased or decreased level of the polypeptide is detected, this polypeptide is a marker for a particular phenotype. Methods of detection are numerous, and thus, it is understood that one skilled in the art can modify the following assay to fit their particular needs.

[2425] For example, antibody-sandwich ELISAs are used to detect polypeptides in a sample, preferably a biological sample. Wells of a microtiter plate are coated with specific antibodies, at a final concentration of 0.2 to 10 ug/ml. The antibodies are either monoclonal or polyclonal and are produced by the method described in Example 10. The wells are blocked so that non-specific binding of the polypeptide to the well is reduced.

[2426] The coated wells are then incubated for >2 hours at RT with a sample containing the polypeptide. Preferably, serial dilutions of the sample should be used to validate results. The plates are then washed three times with deionized or distilled water to remove unbounded polypeptide.

[2427] Next, 50 ul of specific antibody-alkaline phosphatase conjugate, at a concentration of 25-400 ng, is added and incubated for 2 hours at room temperature. The plates are again washed three times with deionized or distilled water to remove unbounded conjugate.

[2428] Add 75 ul of 4-methylumbelliferyl phosphate (MUP) or p-nitrophenyl phosphate (NPP) substrate solution to each well and incubate 1 hour at room temperature. Measure the reaction by a microtiter plate reader. Prepare a standard curve, using serial dilutions of a control sample, and plot polypeptide concentration on the X-axis (log scale) and fluorescence or absorbance of the Y-axis (linear scale). Interpolate the concentration of the polypeptide in the sample using the standard curve.

### Example 23

### Formulation

[2429] The invention also provides methods of treatment and/or prevention of diseases or disorders (such as, for example, any one or more of the diseases or disorders disclosed herein) by administration to a subject of an effective amount of a Therapeutic. By therapeutic is meant polynucleotides or polypeptides of the invention (including fragments and variants), agonists or antagonists thereof, and/or antibodies thereto, in combination with a pharmaceutically acceptable carrier type (e.g., a sterile carrier).

[2430] The Therapeutic will be formulated and dosed in a fashion consistent with good medical practice, taking into account the clinical condition of the individual patient (especially the side effects of treatment with the Therapeutic alone), the site of delivery, the method of administration, the scheduling of administration, and other factors known to practitioners. The “effective amount” for purposes herein is thus determined by such considerations.

[2431] As a general proposition, the total pharmaceutically effective amount of the Therapeutic administered parenterally per dose will be in the range of about 1 ug/kg/day to 10 mg/kg/day of patient body weight, although, as noted above, this will be subject to therapeutic discretion. More preferably, this dose is at least 0.01 mg/kg/day, and most preferably for humans between about 0.01 and 1 mg/kg/day for the hormone. If given continuously, the Therapeutic is typically administered at a dose rate of about 1 ug/kg/hour to about 50 ug/kg/hour, either by 1-4 injections per day or by continuous subcutaneous infusions, for example, using a mini-pump. An intravenous bag solution may also be employed. The length of treatment needed to observe changes and the interval following treatment for responses to occur appears to vary depending on the desired effect.

[2432] Therapeutics can be are administered orally, rectally, parenterally, intracistemally, intravaginally, intraperitoneally, topically (as by powders, ointments, gels, drops or transdermal patch), bucally, or as an oral or nasal spray. “Pharmaceutically acceptable carrier” refers to a non-toxic solid, semisolid or liquid filler, diluent, encapsulating material or formulation auxiliary of any. The term “parenteral” as used herein refers to modes of administration which include intravenous, intramuscular, intraperitoneal, intrastemal, subcutaneous and intraarticular injection and infusion.

[2433] Therapeutics of the invention are also suitably administered by sustained-release systems. Suitable examples of sustained-release Therapeutics are administered orally, rectally, parenterally, intracistemally, intravaginally, intraperitoneally, topically (as by powders, ointments, gels, drops or transdermal patch), bucally, or as an oral or nasal spray. “Pharmaceutically acceptable carrier” refers to a non-toxic solid, semisolid or liquid filler, diluent, encapsulating material or formulation auxiliary of any type. The term “parenteral” as used herein refers to modes of administration which include intravenous, intramuscular, intraperitoneal, intrastemal, subcutaneous and intraarticular injection and infusion.

[2434] Therapeutics of the invention are also suitably administered by sustained-release systems. Suitable examples of sustained-release Therapeutics include suitable polymeric materials (such as, for example, semi-permeable polymer matrices in the form of shaped articles, e.g., films, or mirocapsules), suitable hydrophobic materials (for example as an emulsion in an acceptable oil) or ion exchange resins, and sparingly soluble derivatives (such as, for example, a sparingly soluble salt).

[2435] Sustained-release matrices include polylactides (U.S. Pat. No. 3,773,919, EP 58,481), copolymers of L-glutamic acid and gamma-ethyl-L-glutamate (Sidman et al., Biopolymers 22:547-556 (1983)), poly (2-hydroxyethyl methacrylate) (Langer et al., J. Biomed. Mater. Res. 15:167-277 (1981), and Langer, Chem. Tech. 12:98-105 (1982)), ethylene vinyl acetate (Langer et al., Id.) or poly-D-(−)-3-hydroxybutyric acid (EP 133,988).

[2436] In a preferred embodiment, Neutrokine-alpha and/or Neutrokine-alphaSV compositions of the invention are formulated in a biodegradable, polymeric drug delivery system, for example as described in U.S. Pat. Nos. 4,938,763; 5,278,201; 5,278,202; 5,324,519; 5,340,849; and 5,487,897 and in International Publication Numbers WO01/35929, WO00/24374, and WO00/06117 which are hereby incorporated by reference in their entirety. In specific preferred embodiments the Neutrokine-alpha and/or Neutrokine-alphaSV compositions of the invention are formulated using the ATRIGEL® Biodegradable System of Atrix Laboratories, Inc. (Fort Collins, Colo.).

[2437] Examples of biodegradable polymers which can be used in the formulation of Neutrokine-alpha and/or Neutrokine-alphaSV compositions, include but are not limited to, polylactides, polyglycolides, polycaprolactones, polyanhydrides, polyamides, polyurethanes, polyesteramides, polyorthoesters, polydioxanones, polyacetals, polyketals, polycarbonates, polyorthocarbonates, polyphosphazenes, polyhydroxybutyrates, polyhydroxyvalerates, polyalkylene oxalates, polyalkylene succinates, poly(malic acid), poly(amino acids), poly(methyl vinyl ether), poly(maleic anhydride), polyvinylpyrrolidone, polyethylene glycol, polyhydroxycellulose, chitin, chitosan, and copolymers, terpolymers, or combinations or mixtures of the above materials. The preferred polymers are those that have a lower degree of crystallization and are more hydrophobic. These polymers and copolymers are more soluble in the biocompatible solvents than the highly crystalline polymers such as polyglycolide and chitin which also have a high degree of hydrogen-bonding. Preferred materials with the desired solubility parameters are the polylactides, polycaprolactones, and copolymers of these with glycolide in which there are more amorphous regions to enhance solubility. In specific preferred embodiments, the biodegradable polymers which can be used in the formulation of Neutrokine-alpha and/or Neutrokine-alphaSV compositions are poly(lactide-co-glycolides). Polymer properties such as molecular weight, hydrophobicity, and lactide/glycolide ratio may be modified to obtain the desired drug Neutrokine-alpha and/or Neutrokine-alphaSV release profile (See, e.g., Ravivarapu et al., Journal of Pharmaceutical Sciences 89:732-741 (2000), which is hereby incorporated by refernce in its entirety).

[2438] It is also preferred that the solvent for the biodegradable polymer be non-toxic, water miscible, and otherwise biocompatible. Examples of such solvents include, but are not limted to, N-methyl-2-pyrrolidone, 2-pyrrolidone, C2 to C6 alkanols, C1 to C15 alchohols, dils, triols, and tetraols such as ethanol, glycerine propylene glycol, butanol; C3 to C15 alkyl ketones such as acetone, diethyl ketone and methyl ethyl ketone; C3 to C15 esters such as methyl acetate, ethyl acetate, ethyl lactate; alkyl ketones such as methyl ethyl ketone, C1 to C15 amides such as dimethylformamide, dimethylacetamide and caprolactam; C3 to C20 ethers such as tetrahydrofuran, or solketal; tweens, triacetin, propylene carbonate, decylmethylsulfoxide, dimethyl sulfoxide, oleic acid, 1-dodecylazacycloheptan-2-one, Other preferred solvents are benzyl alchohol, benzyl benzoate, dipropylene glycol, tributyrin, ethyl oleate, glycerin, glycofural, isopropyl myristate, isopropyl palmitate, oleic acid, polyethylene glycol, propylene carbonate, and triethyl citrate. The most preferred solvents are N-methyl-2-pyrrolidone, 2-pyrrolidone, dimethyl sulfoxide, triacetin, and propylene carbonate because of the solvating ability and their compatibility.

[2439] Additionally, formulations comprising Neutrokine-alpha and/or Neutrokine-alphaSV compositions and a biodegradable polymer may also include release-rate modification agents and/or pore-forming agents. Examples of release-rate modification agents include, but are not limited to, fatty acids, triglycerides, other like hydrophobic compounds, organic solvents, plasticizing compounds and hydrophilic compounds. Suitable release rate modification agents include, for example, esters of mono-, di-, and tricarboxylic acids, such as 2-ethoxyethyl acetate, methyl acetate, ethyl acetate, diethyl phthalate, dimethyl phthalate, dibutyl phthalate, dimethyl adipate, dimethyl succinate, dimethyl oxalate, dimethyl citrate, triethyl citrate, acetyl tributyl citrate, acetyl triethyl citrate, glycerol triacetate, di(n-butyl) sebecate, and the like; polyhydroxy alcohols, such as propylene glycol, polyethylene glycol, glycerin, sorbitol, and the like; fatty acids; triesters of glycerol, such as triglycerides, epoxidized soybean oil, and other epoxidized vegetable oils; sterols, such as cholesterol; alcohols, such as C.sub.6-C.sub.12 alkanols, 2-ethoxyethanol, and the like. The release rate modification agent may be used singly or in combination with other such agents. Suitable combinations of release rate modification agents include, but are not limited to, glycerin/propylene glycol, sorbitol/glycerine, ethylene oxide/propylene oxide, butylene glycol/adipic acid, and the like. Preferred release rate modification agents include, but are not limited to, dimethyl citrate, triethyl citrate, ethyl heptanoate, glycerin, and hexanediol. Suitable pore-forming agents that may be used in the polymer composition include, but are not limited to, sugars such as sucrose and dextrose, salts such as sodium chloride and sodium carbonate, polymers such as hydroxylpropylcellulose, carboxymethylcellulose, polyethylene glycol, and polyvinylpyrrolidone. Solid crystals that will provide a defined pore size, such as salt or sugar, are preferred.

[2440] In specific preferred embodiments the Neutrokine-alpha and/or Neutrokine-alphaSV compositions of the invention are formulated using the BEMA™ BioErodible Mucoadhesive System, MCA™ MucoCutaneous Absorption System, SMP™ Solvent MicroParticle System, or BCP™ BioCompatible Polymer System of Atrix Laboratories, Inc. (Fort Collins, Colo.).

[2441] Sustained-release Therapeutics also include liposomally entrapped Therapeutics of the invention (see generally, Langer, Science 249:1527-1533 (1990); Treat et al., in Liposomes in the Therapy of Infectious Disease and Cancer, Lopez-Berestein and Fidler (eds.), Liss, New York, pp. 317-327 and 353-365 (1989)). Liposomes containing the Therapeutic are prepared by methods known per se: DE 3,218,121; Epstein et al., Proc. Natl. Acad. Sci. (USA) 82:3688-3692 (1985); Hwang et al., Proc. Natl. Acad. Sci.(USA) 77:4030-4034 (1980); EP 52,322; EP 36,676; EP 88,046; EP 143,949; EP 142,641; Japanese Pat. Appi. 83-118008; U.S. Pat. Nos. 4,485,045 and 4,544,545; and EP 102,324. Ordinarily, the liposomes are of the small (about 200-800 Angstroms) unilamellar type in which the lipid content is greater than about 30 mol. percent cholesterol, the selected proportion being adjusted for the optimal Therapeutic.

[2442] In yet an additional embodiment, the Therapeutics of the invention are delivered by way of a pump (see Langer, supra; Sefton, CRC Crit. Ref. Biomed. Eng. 14:201 (1987); Buchwald et al., Surgery 88:507 (1980); Saudek et al., N. Engl. J. Med. 321:574 (1989)).

[2443] Other controlled release systems are discussed in the review by Langer (Science 249:1527-1533 (1990)).

[2444] For parenteral administration, in one embodiment, the Therapeutic is formulated generally by mixing it at the desired degree of purity, in a unit dosage injectable form (solution, suspension, or emulsion), with a pharmaceutically acceptable carrier, i.e., one that is non-toxic to recipients at the dosages and concentrations employed and is compatible with other ingredients of the formulation. For example, the formulation preferably does not include oxidizing agents and other compounds that are known to be deleterious to the Therapeutic.

[2445] Generally, the formulations are prepared by contacting the Therapeutic uniformly and intimately with liquid carriers or finely divided solid carriers or both. Then, if necessary, the product is shaped into the desired formulation. Preferably the carrier is a parenteral carrier, more preferably a solution that is isotonic with the blood of the recipient. Examples of such carrier vehicles include water, saline, Ringer's solution, and dextrose solution. Non-aqueous vehicles such as fixed oils and ethyl oleate are also useful herein, as well as liposomes.

[2446] The carrier suitably contains minor amounts of additives such as substances that enhance isotonicity and chemical stability. Such materials are non-toxic to recipients at the dosages and concentrations employed, and include buffers such as phosphate, citrate, succinate, acetic acid, and other organic acids or their salts; antioxidants such as ascorbic acid; low molecular weight (less than about ten residues) polypeptides, e.g., polyarginine or tripeptides; proteins, such as serum albumin, gelatin, or immunoglobulins; hydrophilic polymers such as polyvinylpyrrolidone; amino acids, such as glycine, glutamic acid, aspartic acid, or arginine; monosaccharides, disaccharides, and other carbohydrates including cellulose or its derivatives, glucose, manose, or dextrins; chelating agents such as EDTA; sugar alcohols such as mannitol or sorbitol; counterions such as sodium; and/or nonionic surfactants such as polysorbates, poloxamers, or PEG.

[2447] The Therapeutic is typically formulated in such vehicles at a concentration of about 0.1 mg/ml to 100 mg/ml, preferably 1-10 mg/ml, at a pH of about 3 to 8. It will be understood that the use of certain of the foregoing excipients, carriers, or stabilizers will result in the formation of polypeptide salts.

[2448] Any pharmaceutical used for therapeutic administration can be sterile. Sterility is readily accomplished by filtration through sterile filtration membranes (e.g., 0.2 micron membranes). Therapeutics generally are placed into a container having a sterile access port, for example, an intravenous solution bag or vial having a stopper pierceable by a hypodermic injection needle.

[2449] Therapeutics ordinarily will be stored in unit or multi-dose containers, for example, sealed ampoules or vials, as an aqueous solution or as a lyophilized formulation for reconstitution. As an example of a lyophilized formulation, 10-ml vials are filled with 5 ml of sterile-filtered 1% (w/v) aqueous Therapeutic solution, and the resulting mixture is lyophilized. The infusion solution is prepared by reconstituting the lyophilized Therapeutic using bacteriostatic Water-for-Injection.

[2450] The invention also provides a pharmaceutical pack or kit comprising one or more containers filled with one or more of the ingredients of the Therapeutics of the invention. Associated with such container(s) can be a notice in the form prescribed by a governmental agency regulating the manufacture, use or sale of pharmaceuticals or biological products, which notice reflects approval by the agency of manufacture, use or sale for human administration. In addition, the Therapeutics may be employed in conjunction with other therapeutic compounds.

[2451] The Therapeutics of the invention may be administered alone or in combination with adjuvants. Adjuvants that may be administered with the Therapeutics of the invention include, but are not limited to, alum, alum plus deoxycholate (ImmunoAg), MTP-PE (Biocine Corp.), QS21 (Genentech, Inc.), BCG (e.g., THERACYS®), MPL and nonviable prepartions of Corynebacterium parvum. In a specific embodiment, Therapeutics of the invention are administered in combination with alum. In another specific embodiment, Therapeutics of the invention are administered in combination with QS-21. Further adjuvants that may be administered with the Therapeutics of the invention include, but are not limited to, Monophosphoryl lipid immunomodulator, AdjuVax 100a, QS-21, QS-18, CRL1005, Aluminum salts, MF-59, and Virosomal adjuvant technology. Vaccines that may be administered with the Therapeutics of the invention include, but are not limited to, vaccines directed toward protection against MMR (measles, mumps, rubella), polio, varicella, tetanus/diptheria, hepatitis A, hepatitis B, haemophilus influenzae B, whooping cough, pneumonia, influenza, Lyme's Disease, rotavirus, cholera, yellow fever, Japanese encephalitis, poliomyelitis, rabies, typhoid fever, and pertussis. Combinations may be administered either concomitantly, e.g., as an admixture, separately but simultaneously or concurrently; or sequentially. This includes presentations in which the combined agents are administered together as a therapeutic mixture, and also procedures in which the combined agents are administered separately but simultaneously, e.g., as through separate intravenous lines into the same individual. Administration “in combination” further includes the separate administration of one of the compounds or agents given first, followed by the second.

[2452] The Therapeutics of the invention may be administered alone or in combination with other therapeutic agents. Therapeutic agents that may be administered in combination with the Therapeutics of the invention, include but not limited to, chemotherapeutic agents, antibiotics, steroidal and non-steroidal anti-inflammatories, conventional immunotherapeutic agents, and/or therapeutic treatments described below. Combinations may be administered either concomitantly, e.g., as an admixture, separately but simultaneously or concurrently; or sequentially. This includes presentations in which the combined agents are administered together as a therapeutic mixture, and also procedures in which the combined agents are administered separately but simultaneously, e.g., as through separate intravenous lines into the same individual. Administration “in combination” further includes the separate administration of one of the compounds or agents given first, followed by the second.

[2453] In certain embodiments, Therapeutics of the invention are administered in combination with antiretroviral agents, nucleoside/nucleotide reverse transcriptase inhibitors (NRTIs), non-nucleoside reverse transcriptase inhibitors (NNRTIs), and/or protease inhibitors (PIs). NRTIs that may be administered in combination with the Therapeutics of the invention, include, but are not limited to, RETROVIR™ (zidovudine/AZT), VIDEX™ (didanosine/ddI), HIVID™ (zalcitabine/ddC), ZERIT™ (stavudine/d4T), EPIVIR™ (lamivudine/3TC), and COMBIVIR™ (zidovudine/lamivudine). NNRTIs that may be administered in combination with the Therapeutics of the invention, include, but are not limited to, VIRAMUNE™ (nevirapine), RESCRIPTOR™ (delavirdine), and SUSTIVA™ (efavirenz). Protease inhibitors that may be administered in combination with the Therapeutics of the invention, include, but are not limited to, CRIXIVAN™ (indinavir), NORVIR™ (ritonavir), INVIRASE™ (saquinavir), and VIRACEPT™ (nelfinavir). In a specific embodiment, antiretroviral agents, nucleoside reverse transcriptase inhibitors, non-nucleoside reverse transcriptase inhibitors, and/or protease inhibitors may be used in any combination with Therapeutics of the invention to treat AIDS and/or to prevent or treat HIV infection.

[2454] Additional NRTIs include LODENOSINE™ (F-ddA; an acid-stable adenosine NRTI; Triangle/Abbott; COVIRACIL™ (emtricitabine/FTC; structurally related to lamivudine (3TC) but with 3- to 10-fold greater activity in vitro; Triangle/Abbott); dOTC (BCH-10652, also structurally related to lamivudine but retains activity against a substantial proportion of lamivudine-resistant isolates; Biochem Pharma); Adefovir (refused approval for anti-HIV therapy by FDA; Gilead Sciences); PREVEON® (Adefovir Dipivoxil, the active prodrug of adefovir; its active form is PMEA-pp); TENOFOVIR™ (bis-POC PMPA, a PMPA prodrug; Gilead); DAPD/DXG (active metabolite of DAPD; Triangle/Abbott); D-D4FC (related to 3TC, with activity against AZT/3TC-resistant virus); GW420867X (Glaxo Wellcome); ZIAGEN™ (abacavir/159U89; Glaxo Wellcome Inc.); CS-87 (3′azido-2′,3′-dideoxyuridine; WO 99/66936); and S-acyl-2-thioethyl (SATE)-bearing prodrug forms of β-L-FD4C and β-L-FddC (WO 98/17281).

[2455] Additional NNRTIs include COACTINON™ (Emivirine/MKC-442, potent NNRTI of the HEPT class; Triangle/Abbott); CAPRAVIRINE™ (AG-1549/S-1153, a next generation NNRTI with activity against viruses containing the K 103N mutation; Agouron); PNU-142721 (has 20- to 50-fold greater activity than its predecessor delavirdine and is active against K103N mutants; Pharmacia & Upjohn); DPC-961 and DPC-963 (second-generation derivatives of efavirenz, designed to be active against viruses with the K103N mutation; DuPont); GW-420867×(has 25-fold greater activity than HBY097 and is active against K103N mutants; Glaxo Wellcome); CALANOLIDE A (naturally occurring agent from the latex tree; active against viruses containing either or both the Y181C and K103N mutations); and Propolis (WO 99/49830).

[2456] Additional protease inhibitors include LOPINAVIR™ (ABT378/r; Abbott Laboratories); BMS-232632 (an azapeptide; Bristol-Myres Squibb); TIPRANAVIR™ (PNU-140690, a non-peptic dihydropyrone; Pharmacia & Upjohn); PD-178390 (a nonpeptidic dihydropyrone; Parke-Davis); BMS 232632 (an azapeptide; Bristol-Myers Squibb); L-756,423 (an indinavir analog; Merck); DMP-450 (a cyclic urea compound; Avid & DuPont); AG-1776 (a peptidomimetic with in vitro activity against protease inhibitor-resistant viruses; Agouron); VX-175/GW-433908 (phosphate prodrug of amprenavir; Vertex & Glaxo Welcome); CGP61755 (Ciba); and AGENERASE™ (amprenavir; Glaxo Wellcome Inc.).

[2457] Additional antiretroviral agents include fusion inhibitors/gp41 binders. Fusion inhibitors/gp41 binders include T-20 (a peptide from residues 643-678 of the HIV gp41 transmembrane protein ectodomain which binds to gp41 in its resting state and prevents transformation to the fusogenic state; Trimeris) and T-1249 (a second-generation fusion inhibitor; Trimeris).

[2458] Additional antiretroviral agents include fusion inhibitors/chemokine receptor antagonists. Fusion inhibitors/chemokine receptor antagonists include CXCR4 antagonists such as AMD 3100 (a bicyclam), SDF-1 and its analogs, and ALX40-4C (a cationic peptide), T22 (an 18 amino acid peptide; Trimeris) and the T22 analogs T134 and T140; CCR5 antagonists such as RANTES (9-68), AOP-RANTES, NNY-RANTES, and TAK-779; and CCR5/CXCR4 antagonists such as NSC 651016 (a distamycin analog). Also included are CCR2B, CCR3, and CCR6 antagonists. Chemokine recpetor agonists such as RANTES, SDF-1, MIP-1α, MIP-1β, etc., may also inhibit fusion.

[2459] Additional antiretroviral agents include integrase inhibitors. Integrase inhibitors include dicaffeoylquinic (DFQA) acids; L-chicoric acid (a dicaffeoyltartaric (DCTA) acid); quinalizarin (QLC) and related anthraquinones; ZINTEVIR™ (AR 177, an oligonucleotide that probably acts at cell surface rather than being a true integrase inhibitor; Arondex); and naphthols such as those disclosed in WO 98/50347.

[2460] Additional antiretroviral agents include hydroxyurea-like compunds such as BCX-34 (a purine nucleoside phosphorylase inhibitor; Biocryst); ribonucleotide reductase inhibitors such as DIDOX™ (Molecules for Health); inosine monophosphate dehydrogenase (IMPDH) inhibitors sucha as VX-497 (Vertex); and mycopholic acids such as CellCept (mycophenolate mofetil; Roche).

[2461] Additional antiretroviral agents include inhibitors of viral integrase, inhibitors of viral genome nuclear translocation such as arylene bis(methylketone) compounds; inhibitors of HIV entry such as AOP-RANTES, NNY-RANTES, RANTES-IgG fusion protein, soluble complexes of RANTES and glycosaminoglycans (GAG), and AMD-3100; nucleocapsid zinc finger inhibitors such as dithiane compounds; targets of HIV Tat and Rev; and pharmacoenhancers such as ABT-378.

[2462] Other antiretroviral therapies and adjunct therapies include cytokines and lymphokines such as MIP-1α, MIP-1β, SDF-1α, IL-2, PROLEUKIN™ (aldesleukin/L2-7001; Chiron), IL-4, IL-10, IL-12, and IL-13; interferons such as IFN-α2a; antagonists of TNFs, NFκB, GM-CSF, M-CSF, and IL-10; agents that modulate immune activation such as cyclosporin and prednisone; vaccines such as Remune™ (HIV Immunogen), APL 400-003 (Apollon), recombinant gp120 and fragments, bivalent (B/E) recombinant envelope glycoprotein, rgp120CM235, MN rgp120, SF-2 rgp120, gp120/soluble CD4 complex, Delta JR-FL protein, branched synthetic peptide derived from discontinuous gp120 C3/C4 domain, fusion-competent immunogens, and Gag, Pol, Nef, and Tat vaccines; gene-based therapies such as genetic suppressor elements (GSEs; WO 98/54366), and intrakines (genetically modified CC chemokines targetted to the ER to block surface expression of newly synthesized CCR5 (Yang et al., PNAS 94:11567-72 (1997); Chen et al., Nat. Med. 3:1110-16 (1997)); antibodies such as the anti-CXCR4 antibody 12G5, the anti-CCR5 antibodies 2D7, 5C7, PA8, PA9, PA10, PA11, PA12, and PA14, the anti-CD4 antibodies Q4120 and RPA-T4, the anti-CCR3 antibody 7B11, the anti-gp120 antibodies 17b, 48d, 447-52D, 257-D, 268-D and 50.1, anti-Tat antibodies, anti-TNF-α antibodies, and monoclonal antibody 33A; aryl hydrocarbon (AH) receptor agonists and antagonists such as TCDD, 3,3′,4,4′,5-pentachlorobiphenyl, 3,3′,4,4′-tetrachlorobiphenyl, and α-naphthoflavone (WO 98/30213); and antioxidants such as γ-L-glutamyl-L-cysteine ethyl ester (γ-GCE; WO 99/56764).

[2463] In a further embodiment, the Therapeutics of the invention are administered in combination with an antiviral agent. Antiviral agents that may be administered with the Therapeutics of the invention include, but are not limited to, acyclovir, ribavirin, amantadine, and remantidine.

[2464] In other embodiments, Therapeutics of the invention may be administered in combination with anti-opportunistic infection agents. Anti-opportunistic agents that may be administered in combination with the Therapeutics of the invention, include, but are not limited to, TRIMETHOPRIM-SULFAMETHOXAZOLE™, DAPSONE™, PENTAMIDINE™, ATOVAQUONE™, SONIAZID™, RIFAMPIN™, PYRAZINAMIDE™, ETHAMBUTOL™, RIFABUTIN™, CLARITHROMYCIN™, AZITHROMYCIN™, GANCICLOVIR™, FOSCARNET™, CIDOFOVIR™, FLUCONAZOLE™, ITRACONAZOLE™, KETOCONAZOLE™, ACYCLOVIR™, FAMCICOLVIR™, PYRIMETHAMINE™, LEUCOVORIN™, NEUPOGEN™ (filgrastim/G-CSF), and LEUKINE™ (sargramostim/GM-CSF). In a specific embodiment, Therapeutics of the invention are used in any combination with TRIMETHOPRIM-SULFAMETHOXAZOLE™, DAPSONE™, PENTAMIDINE™, and/or ATOVAQUONE™ to prophylactically treat or prevent an opportunistic Pneumocystis carinii pneumonia infection. In another specific embodiment, Therapeutics of the invention are used in any combination with ISONIAZID™, RIFAMPIN™, PYRAZINAMIDE™, and/or ETHAMBUTOL™ to prophylactically treat or prevent an opportunistic Mycobacterium avium complex infection. In another specific embodiment, Therapeutics of the invention are used in any combination with RIFABUTIN™, CLARITHROMYCIN™, and/or AZITHROMYCIN™ to prophylactically treat or prevent an opportunistic Mycobacterium tuberculosis infection. In another specific embodiment, Therapeutics of the invention are used in any combination with GANCICLOVIR™, FOSCARNET™, and/or CIDOFOVIR™ to prophylactically treat or prevent an opportunistic cytomegalovirus infection. In another specific embodiment, Therapeutics of the invention are used in any combination with FLUCONAZOLE™, ITRACONAZOLE™, and/or KETOCONAZOLE™ to prophylactically treat or prevent an opportunistic fungal infection. In another specific embodiment, Therapeutics of the invention are used in any combination with ACYCLOVIR™ and/or FAMCICOLVIR™ to prophylactically treat or prevent an opportunistic herpes simplex virus type I and/or type II infection. In another specific embodiment, Therapeutics of the invention are used in any combination with PYRIMETHAMINE™ and/or LEUCOVORIN™ to prophylactically treat or prevent an opportunistic Toxoplasma gondii infection. In another specific embodiment, Therapeutics of the invention are used in any combination with LEUCOVORIN™ and/or NEUPOGEN™ to prophylactically treat or prevent an opportunistic bacterial infection.

[2465] In a further embodiment, the Therapeutics of the invention are administered in combination with an antibiotic agent. Antibiotic agents that may be administered with the Therapeutics of the invention include, but are not limited to, amoxicillin, beta-lactamases, aminoglycosides, beta-lactam (glycopeptide), beta-lactamases, Clindamycin, chloramphenicol, cephalosporins, ciprofloxacin, erythromycin, fluoroquinolones, macrolides, metronidazole, penicillins, quinolones, rapamycin, rifampin, streptomycin, sulfonamide, tetracyclines, trimethoprim, trimethoprim-sulfamethoxazole, and vancomycin.

[2466] In other embodiments, Therapeutics of the invention are administered in combination with immunosuppressive agents. Immunosuppressive agents that may be administered in combination with the Therapeutics of the invention include, but are not limited to, steroids, cyclosporine, cyclosporine analogs, cyclophosphamide methylprednisone, prednisone, azathioprine, FK-506, 15-deoxyspergualin, and other immunosuppressive agents that act by suppressing the function of responding T cells. Other immunosuppressive agents that may be administered in combination with the Therapeutics of the invention include, but are not limited to, prednisolone, methotrexate, thalidomide, methoxsalen, rapamycin, leflunomide, mizoribine (BREDININ™), brequinar, deoxyspergualin, and azaspirane (SKF 105685), ORTHOCLONE OKT® 3 (muromonab-CD3), SANDIMMUNE™, NEORAL™, SANGDYA™ (cyclosporine), PROGRAF® (FK506, tacrolimus), CELLCEPT® (mycophenolate motefil, of which the active metabolite is mycophenolic acid), IMURAN™ (azathioprine), glucocorticosteroids, adrenocortical steroids such as DELTASONE™ (prednisone) and HYDELTRASOL™ (prednisolone), FOLEX™ and MEXATE™ (methotrxate), OXSORALEN-ULTRA™ (methoxsalen) and RAPAMUNE™ (sirolimus). In a specific embodiment, immunosuppressants may be used to prevent rejection of organ or bone marrow transplantation.

[2467] In an additional embodiment, Therapeutics of the invention are administered alone or in combination with one or more intravenous immune globulin preparations. Intravenous immune globulin preparations that may be administered with the Therapeutics of the invention include, but not limited to, GAMMAR™, IVEEGAM™, SANDOGLOBULIN™, GAMMAGARD S/D™, ATGAM™ (antithymocyte glubulin), and GAMIMUNE™. In a specific embodiment, Therapeutics of the invention are administered in combination with intravenous immune globulin preparations in transplantation therapy (e.g., bone marrow transplant).

[2468] In certain embodiments, the Therapeutics of the invention are administered alone or in combination with an anti-inflammatory agent. Anti-inflammatory agents that may be administered with the Therapeutics of the invention include, but are not limited to, corticosteroids (e.g. betamethasone, budesonide, cortisone, dexamethasone, hydrocortisone, methylprednisolone, prednisolone, prednisone, and triamcinolone), nonsteroidal anti-inflammatory drugs (e.g., diclofenac, diflunisal, etodolac, fenoprofen, floctafenine, flurbiprofen, ibuprofen, indomethacin, ketoprofen, meclofenamate, mefenamic acid, meloxicam, nabumetone, naproxen, oxaprozin, phenylbutazone, piroxicam, sulindac, tenoxicam, tiaprofenic acid, and tolmetin.), as well as antihistamines, aminoarylcarboxylic acid derivatives, arylacetic acid derivatives, arylbutyric acid derivatives, arylcarboxylic acids, arylpropionic acid derivatives, pyrazoles, pyrazolones, salicylic acid derivatives, thiazinecarboxamides, e-acetamidocaproic acid, S-adenosylmethionine, 3-amino-4-hydroxybutyric acid, amixetrine, bendazac, benzydamine, bucolome, difenpiramide, ditazol, emorfazone, guaiazulene, nabumetone, nimesulide, orgotein, oxaceprol, paranyline, perisoxal, pifoxime, proquazone, proxazole, and tenidap.

[2469] In an additional embodiment, the compositions of the invention are administered alone or in combination with an anti-angiogenic agent. Anti-angiogenic agents that may be administered with the compositions of the invention include, but are not limited to, Angiostatin (Entremed, Rockville, Md.), Troponin-1 (Boston Life Sciences, Boston, Mass.), anti-Invasive Factor, retinoic acid and derivatives thereof, paclitaxel (Taxol), Suramin, Tissue Inhibitor of Metalloproteinase-1, Tissue Inhibitor of Metalloproteinase-2, VEGI, Plasminogen Activator inhibitor-1, Plasminogen Activator Inhibitor-2, and various forms of the lighter “d group” transition metals.

[2470] Lighter “d group” transition metals include, for example, vanadium, molybdenum, tungsten, titanium, niobium, and tantalum species. Such transition metal species may form transition metal complexes. Suitable complexes of the above-mentioned transition metal species include oxo transition metal complexes.

[2471] Representative examples of vanadium complexes include oxo vanadium complexes such as vanadate and vanadyl complexes. Suitable vanadate complexes include metavanadate and orthovanadate complexes such as, for example, ammonium metavanadate, sodium metavanadate, and sodium orthovanadate. Suitable vanadyl complexes include, for example, vanadyl acetylacetonate and vanadyl sulfate including vanadyl sulfate hydrates such as vanadyl sulfate mono- and trihydrates.

[2472] Representative examples of tungsten and molybdenum complexes also include oxo complexes. Suitable oxo tungsten complexes include tungstate and tungsten oxide complexes. Suitable tungstate complexes include ammonium tungstate, calcium tungstate, sodium tungstate dihydrate, and tungstic acid. Suitable tungsten oxides include tungsten (IV) oxide and tungsten (VI) oxide. Suitable oxo molybdenum complexes include molybdate, molybdenum oxide, and molybdenyl complexes. Suitable molybdate complexes include ammonium molybdate and its hydrates, sodium molybdate and its hydrates, and potassium molybdate and its hydrates. Suitable molybdenum oxides include molybdenum (VI) oxide, molybdenum (VI) oxide, and molybdic acid. Suitable molybdenyl complexes include, for example, molybdenyl acetylacetonate. Other suitable tungsten and molybdenum complexes include hydroxo derivatives derived from, for example, glycerol, tartaric acid, and sugars.

[2473] A wide variety of other anti-angiogenic factors may also be utilized within the context of the present invention. Representative examples include, but are not limited to, platelet factor 4; protamine sulphate; sulphated chitin derivatives (prepared from queen crab shells), (Murata et al., Cancer Res. 51:22-26, (1991)); Sulphated Polysaccharide Peptidoglycan Complex (SP-PG) (the function of this compound may be enhanced by the presence of steroids such as estrogen, and tamoxifen citrate); Staurosporine; modulators of matrix metabolism, including for example, proline analogs, cishydroxyproline, d,L-3,4-dehydroproline, Thiaproline, alpha,alpha-dipyridyl, aminopropionitrile fumarate; 4-propyl-5-(4-pyridinyl)-2(3H)-oxazolone; Methotrexate; Mitoxantrone; Heparin; Interferons; 2 Macroglobulin-serum; ChIMP-3 (Pavloff et al., J. Bio. Chem. 267:17321-17326, (1992)); Chymostatin (Tomkinson et al., Biochem J. 286:475-480, (1992)); Cyclodextrin Tetradecasulfate; Eponemycin; Camptothecin; Fumagillin (Ingber et al., Nature 348:555-557, (1990)); Gold Sodium Thiomalate (“GST”; Matsubara and Ziff, J. Clin. Invest. 79:1440-1446, (1987)); anticollagenase-serum; alpha2-antiplasmin (Holmes et al., J. Biol. Chem. 262(4):1659-1664, (1987)); Bisantrene (National Cancer Institute); Lobenzarit disodium (N-(2)-carboxyphenyl-4-chloroanthronilic acid disodium or “CCA”; (Takeuchi et al., Agents Actions 36:312-316, (1992)); and metalloproteinase inhibitors such as BB94.

[2474] Additional anti-angiogenic factors that may also be utilized within the context of the present invention include Thalidomide, (Celgene, Warren, N.J.); Angiostatic steroid; AGM-1470 (H. Brem and J. Folkman J Pediatr. Surg. 28:445-51 (1993)); an integrin alpha v beta 3 antagonist (C. Storgard et al., J. Clin. Invest. 103:47-54 (1999)); carboxynaminolmidazole; Carboxyamidotriazole (CAI) (National Cancer Institute, Bethesda, Md.); Conbretastatin A-4 (CA4P) (OXiGENE, Boston, Mass.); Squalamine (Magainin Pharmaceuticals, Plymouth Meeting, Pa.); TNP-470, (Tap Pharmaceuticals, Deerfield, Ill.); ZD-0101 AstraZeneca (London, UK); APRA (CT2584); Benefin, Byrostatin-1 (SC339555); CGP-41251 (PKC 412); CM101; Dexrazoxane (ICRF187); DMXAA; Endostatin; Flavopridiol; Genestein; GTE; ImmTher; Iressa (ZD 1839); Octreotide (Somatostatin); Panretin; Penacillamine; Photopoint; PI-88; Prinomastat (AG-3340) Purlytin; Suradista (FCE26644); Tamoxifen (Nolvadex); Tazarotene; Tetrathiomolybdate; Xeloda (Capecitabine); and 5-Fluorouracil.

[2475] Anti-angiogenic agents that may be administed in combination with the compounds of the invention may work through a variety of mechanisms including, but not limited to, inhibiting proteolysis of the extracellular matrix, blocking the function of endothelial cell-extracellular matrix adhesion molecules, by antagonizing the function of angiogenesis inducers such as growth factors, and inhibiting integrin receptors expressed on proliferating endothelial cells. Examples of anti-angiogenic inhibitors that interfere with extracellular matrix proteolysis and which may be administered in combination with the compositons of the invention include, but are not lmited to, AG-3340 (Agouron, La Jolla, Calif.), BAY-12-9566 (Bayer, West Haven, Conn.), BMS-275291 (Bristol Myers Squibb, Princeton, N.J.), CGS-27032A (Novartis, East Hanover, N.J.), Marimastat (British Biotech, Oxford, UK), and Metastat (Aeterna, St-Foy, Quebec). Examples of anti-angiogenic inhibitors that act by blocking the function of endothelial cell-extracellular matrix adhesion molecules and which may be administered in combination with the compositons of the invention include, but are not lmited to, EMD-121974 (Merck KcgaA Darmstadt, Germany) and Vitaxin (Ixsys, La Jolla, Calif./Medimmune, Gaithersburg, Md.). Examples of anti-angiogenic agents that act by directly antagonizing or inhibiting angiogenesis inducers and which may be administered in combination with the compositons of the invention include, but are not lmited to, Angiozyme (Ribozyme, Boulder, Colo.), Anti-VEGF antibody (Genentech, S. San Francisco, Calif.), PTK-787/ZK-225846 (Novartis, Basel, Switzerland), SU-101 (Sugen, S. San Francisco, Calif.), SU-5416 (Sugen/Pharmacia Upjohn, Bridgewater, N.J.), and SU-6668 (Sugen). Other anti-angiogenic agents act to indirectly inhibit angiogenesis. Examples of indirect inhibitors of angiogenesis which may be administered in combination with the compositons of the invention include, but are not limited to, IM-862 (Cytran, Kirkland, Wash.), Interferon-alpha, IL-12 (Roche, Nutley, N.J.), and Pentosan polysulfate (Georgetown University, Washington, D.C.).

[2476] In particular embodiments, the use of compositions of the invention in combination with anti-angiogenic agents is contemplated for the treatment, prevention, and/or amelioration of an autoimmune disease, such as for example, an autoimmune disease described herein.

[2477] In a particular embodiment, the use of compositions of the invention in combination with anti-angiogenic agents is contemplated for the treatment, prevention, and/or amelioration of arthritis. In a more particular embodiment, the use of compositions of the invention in combination with anti-angiogenic agents is contemplated for the treatment, prevention, and/or amelioration of rheumatoid arthritis.

[2478] In another embodiment, the polynucleotides encoding a polypeptide of the present invention are administered in combination with an angiogenic protein, or polynucleotides encoding an angiogenic protein. Examples of angiogenic proteins that may be administered with the compositions of the invention include, but are not limited to, acidic and basic fibroblast growth factors, VEGF-1, VEGF-2, VEGF-3, epidermal growth factor alpha and beta, platelet-derived endothelial cell growth factor, platelet-derived growth factor, tumor necrosis factor alpha, hepatocyte growth factor, insulin-like growth factor, colony stimulating factor, macrophage colony stimulating factor, granulocyte/macrophage colony stimulating factor, and nitric oxide synthase.

[2479] In additional embodiments, compositions of the invention are administered in combination with a chemotherapeutic agent. Chemotherapeutic agents that may be administered with the Therapeutics of the invention include, but are not limited to alkylating agents such as nitrogen mustards (for example, Mechlorethamine, cyclophosphamide, Cyclophosphamide Ifosfamide, Melphalan (L-sarcolysin), and Chlorambucil), ethylenimines and methylmelamines (for example, Hexamethylmelamine and Thiotepa), alkyl sulfonates (for example, Busulfan), nitrosoureas (for example, Carmustine (BCNU), Lomustine (CCNU), Semustine (methyl-CCNU), and Streptozocin (streptozotocin)), triazenes (for example, Dacarbazine (DTIC; dimethyltriazenoimidazolecarboxamide)), folic acid analogs (for example, Methotrexate (amethopterin)), pyrimidine analogs (for example, Fluorouacil (5-fluorouracil; 5-FU), Floxuridine (fluorodeoxyuridine; FudR), and Cytarabine (cytosine arabinoside)), purine analogs and related inhibitors (for example, Mercaptopurine (6-mercaptopurine; 6-MP), Thioguanine (6-thioguanine; TG), and Pentostatin (2′-deoxycoformycin)), vinca alkaloids (for example, Vinblastine (VLB, vinblastine sulfate)) and Vincristine (vincristine sulfate)), epipodophyllotoxins (for example, Etoposide and Teniposide), antibiotics (for example, Dactinomycin (actinomycin D), Daunorubicin (daunomycin; rubidomycin), Doxorubicin, Bleomycin, Plicamycin (mithramycin), and Mitomycin (mitomycin C), enzymes (for example, L-Asparaginase), biological response modifiers (for example, Interferon-alpha and interferon-alpha-2b), platinum coordination compounds (for example, Cisplatin (cis-DDP) and Carboplatin), anthracenedione (Mitoxantrone), substituted ureas (for example, Hydroxyurea), methylhydrazine derivatives (for example, Procarbazine (N-methylhydrazine; M1H), adrenocorticosteroids (for example, Prednisone), progestins (for example, Hydroxyprogesterone caproate, Medroxyprogesterone, Medroxyprogesterone acetate, and Megestrol acetate), estrogens (for example, Diethylstilbestrol (DES), Diethylstilbestrol diphosphate, Estradiol, and Ethinyl estradiol), antiestrogens (for example, Tamoxifen), androgens (Testosterone proprionate, and Fluoxymesterone), antiandrogens (for example, Flutamide), gonadotropin-releasing horomone analogs (for example, Leuprolide), other hormones and hormone analogs (for example, methyltestosterone, estramustine, estramustine phosphate sodium, chlorotrianisene, and testolactone), and others (for example, dicarbazine, glutamic acid, and mitotane).

[2480] In one embodiment, the compositions of the invention are administered in combination with one or more of the following drugs: infliximab (also known as Remicade™ Centocor, Inc.), Trocade (Roche, RO-32-3555), Leflunomide (also known as Arava™ from Hoechst Marion Roussel), Kineret™ (an IL-1 Receptor antagonist also known as Anakinra from Amgen, Inc.)

[2481] In a specific embodiment, compositions of the invention are administered in combination with CHOP (cyclophosphamide, doxorubicin, vincristine, and prednisone) or combination of one or more of the components of CHOP. In one embodiment, the compositions of the invention are administered in combination with anti-CD20 antibodies, human monoclonal anti-CD20 antibodies. In another embodiment, the compositions of the invention are administered in combination with anti-CD20 antibodies and CHOP, or anti-CD20 antibodies and any combination of one or more of the components of CHOP, particularly cyclophosphamide and/or prednisone. In a specific embodiment, compositions of the invention are administered in combination with Rituximab. In a further embodiment, compositions of the invention are administered with Rituximab and CHOP, or Rituximab and any combination of one or more of the components of CHOP, particularly cyclophosphamide and/or prednisone. In a specific embodiment, compositions of the invention are administered in combination with tositumomab. In a further embodiment, compositions of the invention are administered with tositumomab and CHOP, or tositumomab and any combination of one or more of the components of CHOP, particularly cyclophosphamide and/or prednisone. The anti-CD20 antibodies may optionally be associated with radioisotopes, toxins or cytotoxic prodrugs.

[2482] In another specific embodiment, the compositions of the invention are administered in combination Zevalin™. In a further embodiment, compositions of the invention are administered with Zevalin™ and CHOP, or Zevalin™ and any combination of one or more of the components of CHOP, particularly cyclophosphamide and/or prednisone. Zevalin™ may be associated with one or more radisotopes. Particularly preferred isotopes are ⁹⁰Y and ¹¹¹In.

[2483] In an additional embodiment, the Therapeutics of the invention are administered in combination with cytokines. Cytokines that may be administered with the Therapeutics of the invention include, but are not limited to, IL2, IL3, IL4, IL5, IL6, IL7, IL10, IL12, IL13, IL15, anti-CD40, CD40L, IFN-gamma and TNF-alpha. In another embodiment, Therapeutics of the invention may be administered with any interleukin, including, but not limited to, IL-1 alpha, IL-1beta, IL-2, IL-3, IL-4, IL-5, IL-6, IL-7, IL-8, IL-9, IL-10, IL-11, IL-12, IL-13, IL-14, IL-15, IL-16, IL-17, IL-18, IL-19, IL-20, and IL-21.

[2484] In one embodiment, the Therapeutics of the invention are administered in combination with members of the TNF family. TNF, TNF-related or TNF-like molecules that may be administered with the Therapeutics of the invention include, but are not limited to, soluble forms of TNF-alpha, lymphotoxin-alpha (LT-alpha, also known as TNF-beta), LT-beta (found in complex heterotrimer LT-alpha2-beta), OPGL, FasL, CD27L, CD30L, CD40L, 4-1BBL, DcR3, OX40L, TNF-gamma (International Publication No. WO 96/14328), AIM-I (International Publication No. WO 97/33899), endokine-alpha (International Publication No. WO 98/07880), OPG, and neutrokine-alpha (International Publication No. WO 98/18921, OX40, and nerve growth factor (NGF), and soluble forms of Fas, CD30, CD27, CD40 and 4-IBB, TR2 (International Publication No. WO 96/34095), DR3 (International Publication No. WO 97/33904), DR4 (International Publication No. WO 98/32856), TR5 (International Publication No. WO 98/30693), TRANK, TR9 (International Publication No. WO 98/56892), TR10 (International Publication No. WO 98/54202), 312C2 (International Publication No. WO 98/06842), and TR12, and soluble forms CD154, CD70, and CD153.

[2485] In an additional embodiment, the Therapeutics of the invention are administered in combination with angiogenic proteins. Angiogenic proteins that may be administered with the Therapeutics of the invention include, but are not limited to, Glioma Derived Growth Factor (GDGF), as disclosed in European Patent Number EP-399816; Platelet Derived Growth Factor-A (PDGF-A), as disclosed in European Patent Number EP-682110; Platelet Derived Growth Factor-B (PDGF-B), as disclosed in European Patent Number EP-282317; Placental Growth Factor (PlGF), as disclosed in International Publication Number WO 92/06194; Placental Growth Factor-2 (PlGF-2), as disclosed in Hauser et al., Growth Factors, 4:259-268 (1993); Vascular Endothelial Growth Factor (VEGF), as disclosed in International Publication Number WO 90/13649; Vascular Endothelial Growth Factor-A (VEGF-A), as disclosed in European Patent Number EP-506477; Vascular Endothelial Growth Factor-2 (VEGF-2), as disclosed in International Publication Number WO 96/39515; Vascular Endothelial Growth Factor B (VEGF-3); Vascular Endothelial Growth Factor B-186 (VEGF-B186), as disclosed in International Publication Number WO 96/26736; Vascular Endothelial Growth Factor-D (VEGF-D), as disclosed in International Publication Number WO 98/02543; Vascular Endothelial Growth Factor-D (VEGF-D), as disclosed in International Publication Number WO 98/07832; and Vascular Endothelial Growth Factor-E (VEGF-E), as disclosed in German Patent Number DE19639601. The above mentioned references are herein incorporated by reference in their entireties.

[2486] In an additional embodiment, the Therapeutics of the invention are administered in combination with Fibroblast Growth Factors. Fibroblast Growth Factors that may be administered with the Therapeutics of the invention include, but are not limited to, FGF-1, FGF-2, FGF-3, FGF-4, FGF-5, FGF-6, FGF-7, FGF-8, FGF-9, FGF-10, FGF-11, FGF-12, FGF-13, FGF-14, and FGF-15.

[2487] In an additional embodiment, the Therapeutics of the invention are administered in combination with hematopoietic growth factors. Hematopoietic growth factors that may be administered with the Therapeutics of the invention include, but are not limited to, granulocyte macrophage colony stimulating factor (GM-CSF) (sargramostim, LEUKINE™, PROKINE™), granulocyte colony stimulating factor (G-CSF) (filgrastim, NEUPOGEN™), macrophage colony stimulating factor (M-CSF, CSF-1) erythropoietin (epoetin alfa, EPOGEN™, PROCRIT™), stem cell factor (SCF, c-kit ligand, steel factor), megakaryocyte colony stimulating factor, PIXY321 (a GMCSF/IL-3 fusion protein), interleukins, especially any one or more of IL-1 through IL-12, interferon-gamma, or thrombopoietin.

[2488] In certain embodiments, Therapeutics of the present invention are administered in combination with adrenergic blockers, such as, for example, acebutolol, atenolol, betaxolol, bisoprolol, carteolol, labetalol, metoprolol, nadolol, oxprenolol, penbutolol, pindolol, propranolol, sotalol, and timolol.

[2489] In another embodiment, the Therapeutics of the invention are administered in combination with an antiarrhythmic drug (e.g., adenosine, amidoarone, bretylium, digitalis, digoxin, digitoxin, diliazem, disopyramide, esmolol, flecainide, lidocaine, mexiletine, moricizine, phenytoin, procainamide, N-acetyl procainamide, propafenone, propranolol, quinidine, sotalol, tocainide, and verapamil).

[2490] In another embodiment, the Therapeutics of the invention are administered in combination with diuretic agents, such as carbonic anhydrase-inhibiting agents (e.g., acetazolamide, dichlorphenamide, and methazolamide), osmotic diuretics (e.g., glycerin, isosorbide, mannitol, and urea), diuretics that inhibit Na⁺—K⁺-2Cl⁻ symport (e.g., furosemide, bumetamide, azosemide, piretamide, tripamide, ethacrynic acid, muzolimine, and torsemide), thiazide and thiazide-like diuretics (e.g., bendroflumethiazide, benzthiazide, chlorothiazide, hydrochlorothiazide, hydroflumethiazide, methyclothiazide, polythiazide, trichormethiazide, chlorthalidone, indapamide, metolazone, and quinethazone), potassium sparing diuretics (e.g., amiloride and triamterene), and mineralcorticoid receptor antagonists (e.g., spironolactone, canrenone, and potassium canrenoate).

[2491] In one embodiment, the Therapeutics of the invention are administered in combination with treatments for endocrine and/or hormone imbalance disorders. Treatments for endocrine and/or hormone imbalance disorders include, but are not limited to, ¹²⁷I, radioactive isotopes of iodine such as ¹³¹I and ¹²³I; recombinant growth hormone, such as HUMATROPE™ (recombinant somatropin); growth hormone analogs such as PROTROPIN™ (somatrem); dopamine agonists such as PARLODEL™ (bromocriptine); somatostatin analogs such as SANDOSTA™ (octreotide); gonadotropin preparations such as PREGNYL™, A.P.L.™ and PROFASI™ (chorionic gonadotropin (CG)), PERGONAL™ (menotropins), and METRODIN™ (urofollitropin (uFSH)); synthetic human gonadotropin releasing hormone preparations such as FACTREL™ and LUTREPULSE™ (gonadorelin hydrochloride); synthetic gonadotropin agonists such as LIJPRON™ (leuprolide acetate), SUPPRELIW™ (histrelin acetate), SYNAREL™ (nafarelin acetate), and ZOLADEX™ (goserelin acetate); synthetic preparations of thyrotropin-releasing hormone such as RELEFACT TRH™ and THYPINONE™ (protirelin); recombinant human TSH such as THYROGEN™; synthetic preparations of the sodium salts of the natural isomers of thyroid hormones such as L-T₄™, SYNTHROID™ and LEVOTHROID™ (levothyroxine sodium), L-T₃™, CYTOMEL™ and TRIOSTAT™ (liothyroine sodium), and THYROLAR™ (liotrix); antithyroid compounds such as 6-n-propylthiouracil (propylthiouracil), 1-methyl-2-mercaptoimidazole and TAPAZOLE™ (methimazole), NEO-MERCAZOLE™ (carbimazole); beta-adrenergic receptor antagonists such as propranolol and esmolol; Ca²⁺ channel blockers; dexamethasone and iodinated radiological contrast agents such as TELEPAQUE™ (iopanoic acid) and ORAGRAFIN™ (sodium ipodate).

[2492] Additional treatments for endocrine and/or hormone imbalance disorders include, but are not limited to, estrogens or congugated estrogens such as ESTRACE™ (estradiol), ESTINYL™ (ethinyl estradiol), PREMARIN™, ESTRATAB™, ORTHO-EST™, OGEN™ and estropipate (estrone), ESTROVIS™ (quinestrol), ESTRADERM™ (estradiol), DELESTROGEIF™ and VALERGEN™ (estradiol valerate), DEPO-ESTRADIOL CYPIONATE™ and ESTROJECT LA™ (estradiol cypionate); antiestrogens such as NOLVADEX™ (tamoxifen), SEROPHENE™ and CLOMID™ (clomiphene); progestins such as DURALU™ (hydroxyprogesterone caproate), MPA™ and DEPO-PROVERA™ (medroxyprogesterone acetate), PROVERA™ and CYCRI™ (MPA), MEGACE™ (megestrol acetate), NORLUTIN™ (norethindrone), and NORLUTATE™ and AYGESTIN™ (norethindrone acetate); progesterone implants such as NORPLAN™ SYSTEM™ (subdermal implants of norgestrel); antiprogestins such as RU 486™ (mifepristone); hormonal contraceptives such as ENOVID™ (norethynodrel plus mestranol), PROGESTASERT™ (intrauterine device that releases progesterone), LOESTRINW™, BREVICON™, MODICON™, GENORA™, NELONA™, NORINYL™, OVACON-35™ and OVACON-50™ (ethinyl estradiol/norethindrone), LEVLEN™, NORDETTE™, TRI-LEVLEN™ and TRIPHASIL-21™ (ethinyl estradiol/levonorgestrel) LO/OVRAL™ and OVRAL™ (ethinyl estradiol/norgestrel), DEMULEN™ (ethinyl estradiol/ethynodiol diacetate), NORNYL™, ORTHO-NOVUM™, NORETHIN™, GENORA™, and NELOVA™ (norethindrone/mestranol), DESOGEN™ and ORTHO-CEPT™ (ethinyl estradiol/desogestrel), ORTHO-CYCLEN™ and ORTHO-TRICYCLEN™ (ethinyl estradiol/norgestimate), MICRONOR™ and NOR-QD™ (norethindrone), and OVRETTE™ (norgestrel).

[2493] Additional treatments for endocrine and/or hormone imbalance disorders include, but are not limited to, testosterone esters such as methenolone acetate and testosterone undecanoate; parenteral and oral androgens such as TESTOJECT-50™ (testosterone), TESTEX™ (testosterone propionate), DELATESTRYL™ (testosterone enanthate), DEPO-TESTOSTERONE™ (testosterone cypionate), DANOCRINE™ (danazol), HALOTEST™ (fluoxymesterone), ORETON METHYL™, TESTRED™ and VIRILON™ (methyltestosterone), and OXANDRIN™ (oxandrolone); testosterone transdermal systems such as TESTODERM™; androgen receptor antagonist and 5-alpha-reductase inhibitors such as ANDROCUR™ (cyproterone acetate), EULEXIN™ (flutamide), and PROSCAR™ (finasteride); adrenocorticotropic hormone preparations such as CORTROSYN™ (cosyntropin); adrenocortical steroids and their synthetic analogs such as ACLOVATE™ (alclometasone dipropionate), CYCLOCORT™ (amcinonide), BECLOVENT™ and VANCERIL™ (beclomethasone dipropionate), CELESTONE™ (betamethasone), BENISONE™ and UTICORT™ (betamethasone benzoate), DIPROSONE™ (betamethasone dipropionate), CELESTONE PHOSPHATE™ (betamethasone sodium phosphate), CELESTONE SOLUSPAN™ (betamethasone sodium phosphate and acetate), BETA-VAL™ and VALISONE™ (betamethasone valerate), TEMOVATE™ (clobetasol propionate), CLODERM™ (clocortolone pivalate), CORTEF™ and HYDROCORTONE™ (cortisol (hydrocortisone)), HYDROCORTONE ACETATE™ (cortisol (hydrocortisone) acetate), LOCOID™ (cortisol (hydrocortisone) butyrate), HYDROCORTONE PHOSPHATE™ (cortisol (hydrocortisone) sodium phosphate), A-HYDROCORT™ and SOLU CORTEF™ (cortisol (hydrocortisone) sodium succinate), WESTCORT™ (cortisol (hydrocortisone) valerate), CORTISONE ACETATE™ (cortisone acetate), DESOWEN™ and TRIDESILON™ (desonide), TOPICORT™ (desoximetasone), DECADRON™ (dexamethasone), DECADRON LA™ (dexamethasone acetate), DECADRON PHOSPHATE™ and HEXADROL PHOSPHATE™ (dexamethasone sodium phosphate), FLORONE™ and MAXIFLOR™ (diflorasone diacetate), FLORINEF ACETATE™ (fludrocortisone acetate), AEROBID™ and NASALIDE™ (flunisolide), FLUONID™ and SYNALAR™ (fluocinolone acetonide), LIDEX™ (fluocinonide), FLUOR-OP™ and FML™ (fluorometholone), CORDRAN™ (flurandrenolide), HALOG™ (halcinonide), HMS LIZUIFILM™ (medrysone), MEDROL™ (methylprednisolone), DEPO-MEDROL™ and MEDROL ACETATE™ (methylprednisone acetate), A-METHAPREDT” and SOLUMEDROL™ (methylprednisolone sodium succinate), ELOCON™ (mometasone furoate), HALDRONE™ (paramethasone acetate), DELTA-CORTEF™ (prednisolone), ECONOPRED™ (prednisolone acetate), HYDELTRASOL™ (prednisolone sodium phosphate), HYDELTRA-T.B.A™ (prednisolone tebutate), DELTASONE™ (prednisone), ARISTOCORT™ and KENACORT™ (triamcinolone), KENALOG™ (triamcinolone acetonide), ARISTOCORT™ and KENACORT DIACETATE™ (triamcinolone diacetate), and ARISTOSPAN™ (triamcinolone hexacetonide); inhibitors of biosynthesis and action of adrenocortical steroids such as CYTADREN™ (aminoglutethimide), NIZORAL™ (ketoconazole), MODRASTANE™ (trilostane), and METOPIRONE™ (metyrapone).

[2494] Additional treatments for endocrine and/or hormone imbalance disorders include, but are not limited to bovine, porcine or human insulin or mixtures thereof; insulin analogs; recombinant human insulin such as HUMULN™ and NOVOLIN™; oral hypoglycemic agents such as ORAMIDE™ and ORINASE™ (tolbutamide), DIABINESE™ (chlorpropamide), TOLAMIDE™ and TOLINASE™ (tolazamide), DYMELOR™ (acetohexamide), glibenclamide, MICRONASE™, DIBETA™ and GLYNASE™ (glyburide), GLUCOTROL™ (glipizide), and DIAMICRON™ (gliclazide), GLUCOPHAGE™ (metformin), PRECOSE™ (acarbose), AMARYL™ (glimepiride), and ciglitazone; thiazolidinediones (TZDs) such as rosiglitazone, AVANDIA™ (rosiglitazone maleate) ACTOS™ (piogliatazone), and troglitazone; alpha-glucosidase inhibitors; bovine or porcine glucagon; somatostatins such as SANDOSTAT™ (octreotide); and diazoxides such as PROGLYCEM™ (diazoxide). In still other embodiments, Therapeutics of the invention are administered in combination with one or more of the following: a biguamide antidiabetic agent, a glitazone antidiabetic agent, and a sulfonylurea antidiabetic agent.

[2495] In one embodiment, the Therapeutics of the invention are administered in combination with treatments for uterine motility disorders. Treatments for uterine motility disorders include, but are not limited to, estrogen drugs such as conjugated estrogens (e.g., PREMARIN® and ESTRATAB®), estradiols (e.g., CLIMARA® and ALORA®), estropipate, and chlorotrianisene; progestin drugs (e.g., AMEN® (medroxyprogesterone), MICRONOR® (norethidrone acetate), PROMETRIUM® progesterone, and megestrol acetate); and estrogen/progesterone combination therapies such as, for example, conjugated estrogens/medroxyprogesterone (e.g., PREMPRO™ and PREMPHASE®) and norethindrone acetate/ethinyl estsradiol (e.g., FEMHRT™).

[2496] In an additional embodiment, the Therapeutics of the invention are administered in combination with drugs effective in treating iron deficiency and hypochromic anemias, including but not limited to, ferrous sulfate (iron sulfate, FEOSOL™), ferrous fumarate (e.g., FEOSTAT™), ferrous gluconate (e.g., FERGON™), polysaccharide-iron complex (e.g., NIFEREX™), iron dextran injection (e.g., INFED™), cupric sulfate, pyroxidine, riboflavin, Vitamin B₁₂, cyancobalamin injection (e.g., REDISOL™, RUBRAMIN PC™), hydroxocobalamin, folic acid (e.g., FOLVITE™), leucovorin (folinic acid, 5-CHOH4PteGlu, citrovorum factor) or WELLCOVORIN (Calcium salt of leucovorin), transferrin or ferritin.

[2497] In certain embodiments, the Therapeutics of the invention are administered in combination with agents used to treat psychiatric disorders. Psychiatric drugs that may be administered with the Therapeutics of the invention include, but are not limited to, antipsychotic agents (e.g., chlorpromazine, chlorprothixene, clozapine, fluphenazine, haloperidol, loxapine, mesoridazine, molindone, olanzapine, perphenazine, pimozide, quetiapine, risperidone, thioridazine, thiothixene, trifluoperazine, and triflupromazine), antimanic agents (e.g., carbamazepine, divalproex sodium, lithium carbonate, and lithium citrate), antidepressants (e.g., amitriptyline, amoxapine, bupropion, citalopram, clomipramine, desipramine, doxepin, fluvoxamine, fluoxetine, imipramine, isocarboxazid, maprotiline, mirtazapine, nefazodone, nortriptyline, paroxetine, phenelzine, protriptyline, sertraline, tranylcypromine, trazodone, trimipramine, and venlafaxine), antianxiety agents (e.g., alprazolam, buspirone, chlordiazepoxide, clorazepate, diazepam, halazepam, lorazepam, oxazepam, and prazepam), and stimulants (e.g., d-amphetamine, methylphenidate, and pemoline).

[2498] In other embodiments, the Therapeutics of the invention are administered in combination with agents used to treat neurological disorders. Neurological agents that may be administered with the Therapeutics of the invention include, but are not limited to, antiepileptic agents (e.g., carbamazepine, clonazepam, ethosuximide, phenobarbital, phenytoin, primidone, valproic acid, divalproex sodium, felbamate, gabapentin, lamotrigine, levetiracetam, oxcarbazepine, tiagabine, topiramate, zonisamide, diazepam, lorazepam, and clonazepam), antiparkinsonian agents (e.g., levodopa/carbidopa, selegiline, amantidine, bromocriptine, pergolide, ropinirole, pramipexole, benztropine; biperiden; ethopropazine; procyclidine; trihexyphenidyl, tolcapone), and ALS therapeutics (e.g. riluzole).

[2499] In another embodiment, Therapeutics of the invention are administered in combination with vasodilating agents and/or calcium channel blocking agents. Vasodilating agents that may be administered with the Therapeutics of the invention include, but are not limited to, Angiotensin Converting Enzyme (ACE) inhibitors (e.g., papaverine, isoxsuprine, benazepril, captopril, cilazapril, enalapril, enalaprilat, fosinopril, lisinopril, moexipril, perindopril, quinapril, ramipril, spirapril, trandolapril, and nylidrin), and nitrates (e.g., isosorbide dinitrate, isosorbide mononitrate, and nitroglycerin). Examples of calcium channel blocking agents that may be administered in combination with the Therapeutics of the invention include, but are not limited to amlodipine, bepridil, diltiazem, felodipine, flunarizine, isradipine, nicardipine, nifedipine, nimodipine, and verapamil.

[2500] In additional embodiments, the Therapeutics of the invention are administered in combination with other therapeutic or prophylactic regimens, such as, for example, radiation therapy.

### Example 24

### Method of Treating Decreased Levels of the Polypeptide

[2501] The present invention relates to a method for treating an individual in need of an increased level of a polypeptide of the invention in the body comprising administering to such an individual a composition comprising a therapeutically effective amount of an agonist of the invention (including polypeptides of the invention). Moreover, it will be appreciated that conditions caused by a decrease in the standard or normal expression level of a secreted protein in an individual can be treated by administering the polypeptide of the present invention, preferably in the secreted form. Thus, the invention also provides a method of treatment of an individual in need of an increased level of the polypeptide comprising administering to such an individual a Therapeutic comprising an amount of the polypeptide to increase the activity level of the polypeptide in such an individual.

[2502] For example, a patient with decreased levels of a polypeptide receives a daily dose 0.1-100 ug/kg of the polypeptide for six consecutive days. Preferably, the polypeptide is in the secreted form. The exact details of the dosing scheme, based on administration and formulation, are provided in Example 23.

### Example 25

### Method of Treating Increased Levels of the Polypeptide

[2503] The present invention also relates to a method of treating an individual in need of a decreased level of a polypeptide of the invention in the body comprising administering to such an individual a composition comprising a therapeutically effective amount of an antagonist of the invention (including polypeptides and antibodies of the invention).

[2504] In one example, antisense technology is used to inhibit production of a polypeptide of the present invention. This technology is one example of a method of decreasing levels of a polypeptide, preferably a secreted form, due to a variety of etiologies, such as cancer. For example, a patient diagnosed with abnormally increased levels of a polypeptide is administered intravenously antisense polynucleotides at 0.5, 1.0, 1.5, 2.0 and 3.0 mg/kg day for 21 days. This treatment is repeated after a 7-day rest period if the treatment was well tolerated. The formulation of the antisense polynucleotide is provided in Example 23.

### Example 26

### Method of Treatment Using Gene Therapy-ex vivo

[2505] One method of gene therapy transplants fibroblasts, which are capable of expressing a polypeptide, onto a patient. Generally, fibroblasts are obtained from a subject by skin biopsy. The resulting tissue is placed in tissue-culture medium and separated into small pieces. Small chunks of the tissue are placed on a wet surface of a tissue culture flask, approximately ten pieces are placed in each flask. The flask is turned upside down, closed tight and left at room temperature over night. After 24 hours at room temperature, the flask is inverted and the chunks of tissue remain fixed to the bottom of the flask and fresh media (e.g., Ham's F12 media, with 10% FBS, penicillin and streptomycin) is added. The flasks are then incubated at 37 degree C. for approximately one week.

[2506] At this time, fresh media is added and subsequently changed every several days. After an additional two weeks in culture, a monolayer of fibroblasts emerge. The monolayer is trypsinized and scaled into larger flasks.

[2507] pMV-7 (Kirschmeier, P. T. et al., DNA, 7:219-25 (1988)), flanked by the long terminal repeats of the Moloney murine sarcoma virus, is digested with EcoRI and HindIII and subsequently treated with calf intestinal phosphatase. The linear vector is fractionated on agarose gel and purified, using glass beads.

[2508] The cDNA encoding a polypeptide of the present invention can be amplified using PCR primers which correspond to the 5′ and 3′ end sequences respectively as set forth in Example 1 using primers and having appropriate restriction sites and initiation/stop codons, if necessary. Preferably, the 5′ primer contains an EcoRI site and the 3′ primer includes a HindIII site. Equal quantities of the Moloney murine sarcoma virus linear backbone and the amplified EcoRI and HindIII fragment are added together, in the presence of T4 DNA ligase. The resulting mixture is maintained under conditions appropriate for ligation of the two fragments. The ligation mixture is then used to transform bacteria HB101, which are then plated onto agar containing kanamycin for the purpose of confirming that the vector has the gene of interest properly inserted.

[2509] The amphotropic pA317 or GP+am12 packaging cells are grown in tissue culture to confluent density in Dulbecco's Modified Eagles Medium (DMEM) with 10% calf serum (CS), penicillin and streptomycin. The MSV vector containing the gene is then added to the media and the packaging cells transduced with the vector. The packaging cells now produce infectious viral particles containing the gene (the packaging cells are now referred to as producer cells).

[2510] Fresh media is added to the transduced producer cells, and subsequently, the media is harvested from a 10 cm plate of confluent producer cells. The spent media, containing the infectious viral particles, is filtered through a millipore filter to remove detached producer cells and this media is then used to infect fibroblast cells. Media is removed from a sub-confluent plate of fibroblasts and quickly replaced with the media from the producer cells. This media is removed and replaced with fresh media. If the titer of virus is high, then virtually all fibroblasts will be infected and no selection is required. If the titer is very low, then it is necessary to use a retroviral vector that has a selectable marker, such as neo or his. Once the fibroblasts have been efficiently infected, the fibroblasts are analyzed to determine whether protein is produced.

[2511] The engineered fibroblasts are then transplanted onto the host, either alone or after having been grown to confluence on cytodex 3 microcarrier beads.

### Example 27

### Gene Therapy Using Endogenous Genes Corresponding to Polynucleotides of the Invention

[2512] Another method of gene therapy according to the present invention involves operably associating the endogenous polynucleotide sequence of the invention with a promoter via homologous recombination as described, for example, in U.S. Pat. No. 5,641,670, issued Jun. 24, 1997; International Publication NO: WO 96/29411, published Sep. 26, 1996; International Publication NO: WO 94/12650, published Aug. 4, 1994; Koller et al., Proc. Natl. Acad. Sci. USA, 86:8932-8935 (1989); and Zijlstra et al., Nature, 342:435-438 (1989). This method involves the activation of a gene which is present in the target cells, but which is not expressed in the cells, or is expressed at a lower level than desired.

[2513] Polynucleotide constructs are made which contain a promoter and targeting sequences, which are homologous to the 5′ non-coding sequence of endogenous polynucleotide sequence, flanking the promoter. The targeting sequence will be sufficiently near the 5′ end of the polynucleotide sequence so the promoter will be operably linked to the endogenous sequence upon homologous recombination. The promoter and the targeting sequences can be amplified using PCR. Preferably, the amplified promoter contains distinct restriction enzyme sites on the 5′ and 3′ ends. Preferably, the 3′ end of the first targeting sequence contains the same restriction enzyme site as the 5′ end of the amplified promoter and the 5′ end of the second targeting sequence contains the same restriction site as the 3′ end of the amplified promoter.

[2514] The amplified promoter and the amplified targeting sequences are digested with the appropriate restriction enzymes and subsequently treated with calf intestinal phosphatase. The digested promoter and digested targeting sequences are added together in the presence of T4 DNA ligase. The resulting mixture is maintained under conditions appropriate for ligation of the two fragments. The construct is size fractionated on an agarose gel then purified by phenol extraction and ethanol precipitation.

[2515] In this Example, the polynucleotide constructs are administered as naked polynucleotides via electroporation. However, the polynucleotide constructs may also be administered with transfection-facilitating agents, such as liposomes, viral sequences, viral particles, precipitating agents, etc. Such methods of delivery are known in the art.

[2516] Once the cells are transfected, homologous recombination will take place which results in the promoter being operably linked to the endogenous polynucleotide sequence. This results in the expression of polynucleotide corresponding to the polynucleotide in the cell. Expression may be detected by immunological staining, or any other method known in the art.

[2517] Fibroblasts are obtained from a subject by skin biopsy. The resulting tissue is placed in DMEM+10% fetal calf serum. Exponentially growing or early stationary phase fibroblasts are trypsinized and rinsed from the plastic surface with nutrient medium. An aliquot of the cell suspension is removed for counting, and the remaining cells are subjected to centrifugation. The supernatant is aspirated and the pellet is resuspended in 5 ml of electroporation buffer (20 mM HEPES pH 7.3, 137 mM NaCl, 5 mM KCl, 0.7 mM Na₂ HPO₄, 6 mM dextrose). The cells are recentrifuged, the supernatant aspirated, and the cells resuspended in electroporation buffer containing 1 mg/ml acetylated bovine serum albumin. The final cell suspension contains approximately 3×10⁶ cells/ml. Electroporation should be performed immediately following resuspension.

[2518] Plasmid DNA is prepared according to standard techniques. For example, to construct a plasmid for targeting to the locus corresponding to the polynucleotide of the invention, plasmid pUC 18 (MBI Fermentas, Amherst, N.Y.) is digested with HindIII. The CMV promoter is amplified by PCR with an XbaI site on the 5′ end and a BamHI site on the 3′end. Two non-coding sequences are amplified via PCR: one non-coding sequence (fragment 1) is amplified with a HindIII site at the 5′ end and an Xba site at the 3′end; the other non-coding sequence (fragment 2) is amplified with a BamHI site at the 5′end and a HindIII site at the 3′end. The CMV promoter and the fragments (1 and 2) are digested with the appropriate enzymes (CMV promoter—XbaI and BamHI; fragment 1—XbaI; fragment 2—BamHI) and ligated together. The resulting ligation product is digested with HindIII, and ligated with the HindIII-digested pUC18 plasmid.

[2519] Plasmid DNA is added to a sterile cuvette with a 0.4 cm electrode gap (Bio-Rad). The final DNA concentration is generally at least 120 μg/ml. 0.5 ml of the cell suspension (containing approximately 1.5×10⁶ cells) is then added to the cuvette, and the cell suspension and DNA solutions are gently mixed. Electroporation is performed with a Gene-Pulser apparatus (Bio-Rad). Capacitance and voltage are set at 960 μF and 250-300 V, respectively. As voltage increases, cell survival decreases, but the percentage of surviving cells that stably incorporate the introduced DNA into their genome increases dramatically. Given these parameters, a pulse time of approximately 14-20 mSec should be observed.

[2520] Electroporated cells are maintained at room temperature for approximately 5 min, and the contents of the cuvette are then gently removed with a sterile transfer pipette. The cells are added directly to 10 ml of prewarmed nutrient media (DMEM with 15% calf serum) in a 10 cm dish and incubated at 37 degree C. The following day, the media is aspirated and replaced with 10 ml of fresh media and incubated for a further 16-24 hours.

[2521] The engineered fibroblasts are then injected into the host, either alone or after having been grown to confluence on cytodex 3 microcarrier beads. The fibroblasts now produce the protein product. The fibroblasts can then be introduced into a patient as described above.

### Example 28

### Method of Treatment Using Gene Therapy—in vivo

[2522] Another aspect of the present invention is using in vivo gene therapy methods to treat disorders, diseases and conditions. The gene therapy method relates to the introduction of naked nucleic acid (DNA, RNA, and antisense DNA or RNA) sequences into an animal to increase or decrease the expression of the polypeptide. The polynucleotide of the present invention may be operatively linked to a promoter or any other genetic elements necessary for the expression of the polypeptide by the target tissue. Such gene therapy and delivery techniques and methods are known in the art, see, for example, WO90/11092, WO98/11779; U.S. Pat. No. 5,693,622, 5,705,151, 5,580,859; Tabata et al., Cardiovasc. Res. 35(3):470-479 (1997); Chao et al., Pharmacol. Res. 35(6):517-522 (1997); Wolff, Neuromuscul. Disord. 7(5):314-318 (1997); Schwartz et al., Gene Ther. 3(5):405-411 (1996); Tsurumi et al., Circulation 94(12):3281-3290 (1996) (incorporated herein by reference).

[2523] The polynucleotide constructs may be delivered by any method that delivers injectable materials to the cells of an animal, such as, injection into the interstitial space of tissues (heart, muscle, skin, lung, liver, intestine and the like). The polynucleotide constructs can be delivered in a pharmaceutically acceptable liquid or aqueous carrier.

[2524] The term “naked” polynucleotide, DNA or RNA, refers to sequences that are free from any delivery vehicle that acts to assist, promote, or facilitate entry into the cell, including viral sequences, viral particles, liposome formulations, lipofectin or precipitating agents and the like. However, the polynucleotides of the present invention may also be delivered in liposome formulations (such as those taught in Felgner P. L. et al. (1995) Ann. NY Acad. Sci. 772:126-139 and Abdallah B. et al. (1995) Biol. Cell 85(1):1-7) which can be prepared by methods well known to those skilled in the art.

[2525] The polynucleotide vector constructs used in the gene therapy method are preferably constructs that will not integrate into the host genome nor will they contain sequences that allow for replication. Any strong promoter known to those skilled in the art can be used for driving the expression of DNA. Unlike other gene therapies techniques, one major advantage of introducing naked nucleic acid sequences into target cells is the transitory nature of the polynucleotide synthesis in the cells. Studies have shown that non-replicating DNA sequences can be introduced into cells to provide production of the desired polypeptide for periods of up to six months.

[2526] The polynucleotide construct can be delivered to the interstitial space of tissues within the an animal, including of muscle, skin, brain, lung, liver, spleen, bone marrow, thymus, heart, lymph, blood, bone, cartilage, pancreas, kidney, gall bladder, stomach, intestine, testis, ovary, uterus, rectum, nervous system, eye, gland, and connective tissue. Interstitial space of the tissues comprises the intercellular fluid, mucopolysaccharide matrix among the reticular fibers of organ tissues, elastic fibers in the walls of vessels or chambers, collagen fibers of fibrous tissues, or that same matrix within connective tissue ensheathing muscle cells or in the lacunae of bone. It is similarly the space occupied by the plasma of the circulation and the lymph fluid of the lymphatic channels. Delivery to the interstitial space of muscle tissue is preferred for the reasons discussed below. They may be conveniently delivered by injection into the tissues comprising these cells. They are preferably delivered to and expressed in persistent, non-dividing cells which are differentiated, although delivery and expression may be achieved in non-differentiated or less completely differentiated cells, such as, for example, stem cells of blood or skin fibroblasts. In vivo muscle cells are particularly competent in their ability to take up and express polynucleotides.

[2527] For the naked polynucleotide injection, an effective dosage amount of DNA or RNA will be in the range of from about 0.05 g/kg body weight to about 50 mg/kg body weight. Preferably the dosage will be from about 0.005 mg/kg to about 20 mg/kg and more preferably from about 0.05 mg/kg to about 5 mg/kg. Of course, as the artisan of ordinary skill will appreciate, this dosage will vary according to the tissue site of injection. The appropriate and effective dosage of nucleic acid sequence can readily be determined by those of ordinary skill in the art and may depend on the condition being treated and the route of administration. The preferred route of administration is by the parenteral route of injection into the interstitial space of tissues. However, other parenteral routes may also be used, such as, inhalation of an aerosol formulation particularly for delivery to lungs or bronchial tissues, throat or mucous membranes of the nose. In addition, naked polynucleotide constructs can be delivered to arteries during angioplasty by the catheter used in the procedure.

[2528] The dose response effects of injected polynucleotide in muscle in vivo is determined as follows. Suitable template DNA for production of mRNA coding for polypeptide of the present invention is prepared in accordance with a standard recombinant DNA methodology. The template DNA, which may be either circular or linear, is either used as naked DNA or complexed with liposomes. The quadriceps muscles of mice are then injected with various amounts of the template DNA.

[2529] Five to six week old female and male Balb/C mice are anesthetized by intraperitoneal injection with 0.3 ml of 2.5% Avertin. A 1.5 cm incision is made on the anterior thigh, and the quadriceps muscle is directly visualized. The template DNA is injected in 0.1 ml of carrier in a 1 cc syringe through a 27 gauge needle over one minute, approximately 0.5 cm from the distal insertion site of the muscle into the knee and about 0.2 cm deep. A suture is placed over the injection site for future localization, and the skin is closed with stainless steel clips.

[2530] After an appropriate incubation time (e.g., 7 days) muscle extracts are prepared by excising the entire quadriceps. Every fifth 15 um cross-section of the individual quadriceps muscles is histochemically stained for protein expression. A time course for protein expression may be done in a similar fashion except that quadriceps from different mice are harvested at different times. Persistence of DNA in muscle following injection may be determined by Southern blot analysis after preparing total cellular DNA and HIRT supernatants from injected and control mice. The results of the above experimentation in mice can be use to extrapolate proper dosages and other treatment parameters in humans and other animals using naked DNA.

### Example 29

### Transgenic Animals

[2531] The polypeptides of the invention can also be expressed in transgenic animals. Animals of any species, including, but not limited to, mice, rats, rabbits, hamsters, guinea pigs, pigs, micro-pigs, goats, sheep, cows and non-human primates, e.g., baboons, monkeys, and chimpanzees may be used to generate transgenic animals. In a specific embodiment, techniques described herein or otherwise known in the art, are used to express polypeptides of the invention in humans, as part of a gene therapy protocol.

[2532] Any technique known in the art may be used to introduce the transgene (i.e., polynucleotides of the invention) into animals to produce the founder lines of transgenic animals. Such techniques include, but are not limited to, pronuclear microinjection (Paterson et al., Appl. Microbiol. Biotechnol. 40:691-698 (1994); Carver et al., Biotechnology (NY) 11:1263-1270 (1993); Wright et al., Biotechnology (NY) 9:830-834 (1991); and Hoppe et al., U.S. Pat. No. 4,873,191 (1989)); retrovirus mediated gene transfer into germ lines (Van der Putten et al., Proc. Natl. Acad. Sci., USA 82:6148-6152 (1985)), blastocysts or embryos; gene targeting in embryonic stem cells (Thompson et al., Cell 56:313-321 (1989)); electroporation of cells or embryos (Lo, 1983, Mol Cell. Biol. 3:1803-1814 (1983)); introduction of the polynucleotides of the invention using a gene gun (see, e.g., Ulmer et al., Science 259:1745 (1993); introducing nucleic acid constructs into embryonic pleuripotent stem cells and transferring the stem cells back into the blastocyst; and sperm-mediated gene transfer (Lavitrano et al., Cell 57:717-723 (1989); etc. For a review of such techniques, see Gordon, “Transgenic Animals,” Intl. Rev. Cytol. 115:171-229 (1989), which is incorporated by reference herein in its entirety.

[2533] Any technique known in the art may be used to produce transgenic clones containing polynucleotides of the invention, for example, nuclear transfer into enucleated oocytes of nuclei from cultured embryonic, fetal, or adult cells induced to quiescence (Campell et al., Nature 380:64-66 (1996); Wilmut et al., Nature 385:810-813 (1997)).

[2534] The present invention provides for transgenic animals that carry the transgene in all their cells, as well as animals which carry the transgene in some, but not all their cells, i.e., mosaic animals or chimeric. The transgene may be integrated as a single transgene or as multiple copies such as in concatamers, e.g., head-to-head tandems or head-to-tail tandems. The transgene may also be selectively introduced into and activated in a particular cell type by following, for example, the teaching of Lasko et al. (Lasko et al., Proc. Natl. Acad. Sci. USA 89:6232-6236 (1992)). The regulatory sequences required for such a cell-type specific activation will depend upon the particular cell type of interest, and will be apparent to those of skill in the art. When it is desired that the polynucleotide transgene be integrated into the chromosomal site of the endogenous gene, gene targeting is preferred. Briefly, when such a technique is to be utilized, vectors containing some nucleotide sequences homologous to the endogenous gene are designed for the purpose of integrating, via homologous recombination with chromosomal sequences, into and disrupting the function of the nucleotide sequence of the endogenous gene. The transgene may also be selectively introduced into a particular cell type, thus inactivating the endogenous gene in only that cell type, by following, for example, the teaching of Gu et al. (Gu et al., Science 265:103-106 (1994)). The regulatory sequences required for such a cell-type specific inactivation will depend upon the particular cell type of interest, and will be apparent to those of skill in the art.

[2535] Once transgenic animals have been generated, the expression of the recombinant gene may be assayed utilizing standard techniques. Initial screening may be accomplished by Southern blot analysis or PCR techniques to analyze animal tissues to verify that integration of the transgene has taken place. The level of mRNA expression of the transgene in the tissues of the transgenic animals may also be assessed using techniques which include, but are not limited to, Northern blot analysis of tissue samples obtained from the animal, in situ hybridization analysis, and reverse transcriptase-PCR (rt-PCR). Samples of transgenic gene-expressing tissue may also be evaluated immunocytochemically or immunohistochemically using antibodies specific for the transgene product.

[2536] Once the founder animals are produced, they may be bred, inbred, outbred, or crossbred to produce colonies of the particular animal. Examples of such breeding strategies include, but are not limited to: outbreeding of founder animals with more than one integration site in order to establish separate lines; inbreeding of separate lines in order to produce compound transgenics that express the transgene at higher levels because of the effects of additive expression of each transgene; crossing of heterozygous transgenic animals to produce animals homozygous for a given integration site in order to both augment expression and eliminate the need for screening of animals by DNA analysis; crossing of separate homozygous lines to produce compound heterozygous or homozygous lines; and breeding to place the transgene on a distinct background that is appropriate for an experimental model of interest.

[2537] Transgenic animals of the invention have uses which include, but are not limited to, animal model systems useful in elaborating the biological function of polypeptides of the present invention, studying diseases, disorders, and/or conditions associated with aberrant expression, and in screening for compounds effective in ameliorating such diseases, disorders, and/or conditions.

### Example 30

### Knock-Out Animals

[2538] Endogenous gene expression can also be reduced by inactivating or “knocking out” the gene and/or its promoter using targeted homologous recombination. (E.g., see Smithies et al., Nature 317:230-234 (1985); Thomas & Capecchi, Cell 51:503-512 (1987); Thompson et al., Cell 5:313-321 (1989); each of which is incorporated by reference herein in its entirety). For example, a mutant, non-functional polynucleotide of the invention (or a completely unrelated DNA sequence) flanked by DNA homologous to the endogenous polynucleotide sequence (either the coding regions or regulatory regions of the gene) can be used, with or without a selectable marker and/or a negative selectable marker, to transfect cells that express polypeptides of the invention in vivo. In another embodiment, techniques known in the art are used to generate knockouts in cells that contain, but do not express the gene of interest. Insertion of the DNA construct, via targeted homologous recombination, results in inactivation of the targeted gene. Such approaches are particularly suited in research and agricultural fields where modifications to embryonic stem cells can be used to generate animal offspring with an inactive targeted gene (e.g., see Thomas & Capecchi 1987 and Thompson 1989, supra). However this approach can be routinely adapted for use in humans provided the recombinant DNA constructs are directly administered or targeted to the required site in vivo using appropriate viral vectors that will be apparent to those of skill in the art.

[2539] In further embodiments of the invention, cells that are genetically engineered to express the polypeptides of the invention, or alternatively, that are genetically engineered not to express the polypeptides of the invention (e.g., knockouts) are administered to a patient in vivo. Such cells may be obtained from the patient (i.e., animal, including human) or an MHC compatible donor and can include, but are not limited to fibroblasts, bone marrow cells, blood cells (e.g., lymphocytes), adipocytes, muscle cells, endothelial cells etc. The cells are genetically engineered in vitro using recombinant DNA techniques to introduce the coding sequence of polypeptides of the invention into the cells, or alternatively, to disrupt the coding sequence and/or endogenous regulatory sequence associated with the polypeptides of the invention, eg., by transduction (using viral vectors, and preferably vectors that integrate the transgene into the cell genome) or transfection procedures, including, but not limited to, the use of plasmids, cosmids, YACs, naked DNA, electroporation, liposomes, etc. The coding sequence of the polypeptides of the invention can be placed under the control of a strong constitutive or inducible promoter or promoter/enhancer to achieve expression, and preferably secretion, of the polypeptides of the invention. The engineered cells which express and preferably secrete the polypeptides of the invention can be introduced into the patient systemically, e.g., in the circulation, or intraperitoneally.

[2540] Alternatively, the cells can be incorporated into a matrix and implanted in the body, eg., genetically engineered fibroblasts can be implanted as part of a skin graft; genetically engineered endothelial cells can be implanted as part of a lymphatic or vascular graft. (See, for example, Anderson et al. U.S. Pat. No. 5,399,349; and Mulligan & Wilson, U.S. Pat. No. 5,460,959 each of which is incorporated by reference herein in its entirety).

[2541] When the cells to be administered are non-autologous or non-MHC compatible cells, they can be administered using well known techniques which prevent the development of a host immune response against the introduced cells. For example, the cells may be introduced in an encapsulated form which, while allowing for an exchange of components with the immediate extracellular environment, does not allow the introduced cells to be recognized by the host immune system.

[2542] Transgenic and “knock-out” animals of the invention have uses which include, but are not limited to, animal model systems useful in elaborating the biological function of polypeptides of the present invention, studying diseases, disorders, and/or conditions associated with aberrant expression, and in screening for compounds effective in ameliorating such diseases, disorders, and/or conditions.

### Example 31

### Production of an Antibody

[2543] Hybridoma Technology

[2544] The antibodies of the present invention can be prepared by a variety of methods. (See, Current Protocols, Chapter 2.) As one example of such methods, cells expressing polypeptide(s) of the invention are administered to an animal to induce the production of sera containing polyclonal antibodies. In a preferred method, a preparation of polypeptide(s) of the invention is prepared and purified to render it substantially free of natural contaminants. Such a preparation is then introduced into an animal in order to produce polyclonal antisera of greater specific activity.

[2545] Monoclonal antibodies specific for polypeptide(s) of the invention are prepared using hybridoma technology. (Kohler et al., Nature 256:495 (1975); Kohler et al., Eur. J. Immunol. 6:511 (1976); Kohler et al., Eur. J. Immunol. 6:292 (1976); Hammerling et al., in: Monoclonal Antibodies and T-Cell Hybridomas, Elsevier, N.Y., pp. 563-681 (1981)). In general, an animal (preferably a mouse) is immunized with polypeptide(s) of the invention, or, more preferably, with a secreted polypeptide-expressing cell. Such polypeptide-expressing cells are cultured in any suitable tissue culture medium, preferably in Earle's modified Eagle's medium supplemented with 10% fetal bovine serum (inactivated at about 56° C.), and supplemented with about 10 g/l of nonessential amino acids, about 1,000 U/ml of penicillin, and about 100 μg/ml of streptomycin.

[2546] The splenocytes of such mice are extracted and fused with a suitable myeloma cell line. Any suitable myeloma cell line may be employed in accordance with the present invention; however, it is preferable to employ the parent myeloma cell line (SP20), available from the ATCC. After fusion, the resulting hybridoma cells are selectively maintained in HAT medium, and then cloned by limiting dilution as described by Wands et al. (Gastroenterology 80:225-232 (1981)). The hybridoma cells obtained through such a selection are then assayed to identify clones which secrete antibodies capable of binding the polypeptide(s) of the invention.

[2547] Alternatively, additional antibodies capable of binding polypeptide(s) of the invention can be produced in a two-step procedure using anti-idiotypic antibodies. Such a method makes use of the fact that antibodies are themselves antigens, and therefore, it is possible to obtain an antibody which binds to a second antibody. In accordance with this method, protein specific antibodies are used to immunize an animal, preferably a mouse. The splenocytes of such an animal are then used to produce hybridoma cells, and the hybridoma cells are screened to identify clones which produce an antibody whose ability to bind to the polypeptide(s) of the invention protein-specific antibody can be blocked by polypeptide(s) of the invention. Such antibodies comprise anti-idiotypic antibodies to the polypeptide(s) of the invention protein-specific antibody and are used to immunize an animal to induce formation of further polypeptide(s) of the invention protein-specific antibodies.

[2548] For in vivo use of antibodies in humans, an antibody is “humanized”. Such antibodies can be produced using genetic constructs derived from hybridoma cells producing the monoclonal antibodies described above. Methods for producing chimeric and humanized antibodies are known in the art and are discussed herein. (See, for review, Morrison, Science 229:1202 (1985); Oi et al., BioTechniques 4:214 (1986); Cabilly et al., U.S. Pat. No. 4,816,567; Taniguchi et al., EP 171496; Morrison et al., EP 173494; Neuberger et al., WO 8601533; Robinson et al., WO 8702671; Boulianne et al., Nature 312:643 (1984); Neuberger et al., Nature 314:268 (1985).)

[2549] Isolation of Antibody Fragments Directed polypeptide(s) of the invention from a Library of scFvs

[2550] Naturally occurring V-genes isolated from human PBLs are constructed into a library of antibody fragments which contain reactivities against polypeptide(s) of the invention to which the donor may or may not have been exposed (see e.g., U.S. Pat. No. 5,885,793 incorporated herein by reference in its entirety).

[2551] Rescue of the Library. A library of scFvs is constructed from the RNA of human PBLs as described in PCT publication WO 92/01047. To rescue phage displaying antibody fragments, approximately 109 E. coli harboring the phagemid are used to inoculate 50 ml of 2×TY containing 1% glucose and 100 μg/ml of ampicillin (2×TY-AMP-GLU) and grown to an O.D. of 0.8 with shaking. Five ml of this culture is used to innoculate 50 ml of 2×TY-AMP-GLU, 2×10⁸ TU of delta gene 3 helper (M13 delta gene III, see PCT publication WO 92/01047) are added and the culture incubated at 37° C. for 45 minutes without shaking and then at 37° C. for 45 minutes with shaking. The culture is centrifuged at 4000 r.p.m. for 10 min. and the pellet resuspended in 2 liters of 2×TY containing 100 μg/ml ampicillin and 50 ug/ml kanamycin and grown overnight. Phage are prepared as described in PCT publication WO 92/01047.

[2552] M13 delta gene III is prepared as follows: M13 delta gene III helper phage does not encode gene III protein, hence the phage(mid) displaying antibody fragments have a greater avidity of binding to antigen. Infectious M13 delta gene III particles are made by growing the helper phage in cells harboring a pUC 19 derivative supplying the wild type gene III protein during phage morphogenesis. The culture is incubated for 1 hour at 37° C. without shaking and then for a further hour at 37° C. with shaking. Cells are spun down (IEC-Centra 8,400 r.p.m. for 10 min), resuspended in 300 ml 2×TY broth containing 100 μg ampicillin/ml and 25 μg kanamycin/ml (2×TY-AMP-KAN) and grown overnight, shaking at 37° C. Phage particles are purified and concentrated from the culture medium by two PEG-precipitations (Sambrook et al., 1990), resuspended in 2 ml PBS and passed through a 0.45 μm filter (Minisart NML; Sartorius) to give a final concentration of approximately 1013 transducing units/ml (ampicillin-resistant clones).

[2553] Panning of the Library. Immunotubes (Nunc) are coated overnight in PBS with 4 ml of either 100 μg/ml or 10 μg/ml of a polypeptide of the present invention. Tubes are blocked with 2% Marvel-PBS for 2 hours at 37° C. and then washed 3 times in PBS. Approximately 1013 TU of phage is applied to the tube and incubated for 30 minutes at room temperature tumbling on an over and under turntable and then left to stand for another 1.5 hours. Tubes are washed 10 times with PBS 0.1% Tween-20 and 10 times with PBS. Phage are eluted by adding 1 ml of 100 mM triethylamine and rotating 15 minutes on an under and over turntable after which the solution is immediately neutralized with 0.5 ml of 1.0M Tris-HCl, pH 7.4. Phage are then used to infect 10 ml of mid-log E. coli TG1 by incubating eluted phage with bacteria for 30 minutes at 37° C. The E. coli are then plated on TYE plates containing 1% glucose and 100 μg/ml ampicillin. The resulting bacterial library is then rescued with delta gene 3 helper phage as described above to prepare phage for a subsequent round of selection. This process is then repeated for a total of 4 rounds of affinity purification with tube-washing increased to 20 times with PBS, 0.1% Tween-20 and 20 times with PBS for rounds 3 and 4.

[2554] Characterization of Binders. Eluted phage from the 3rd and 4th rounds of selection are used to infect E. coli HB 2151 and soluble scFv is produced (Marks, et al., 1991) from single colonies for assay. ELISAs are performed with microtitre plates coated with either 10 μg/ml of the polypeptide of the present invention in 50 mM bicarbonate pH 9.6. Clones positive in ELISA are further characterized by PCR fingerprinting (see, e.g., PCT publication WO 92/01047) and then by sequencing. These ELISA positive clones may also be further characterized by techniques known in the art, such as, for example, epitope mapping, binding affinity, receptor signal transduction, ability to block or competitively inhibit antibody/antigen binding, and competitive agonistic or antagonistic activity.

### Example 32

### Assays Detecting Stimulation or Inhibition of B Cell Proliferation and Differentiation

[2555] Generation of functional humoral immune responses requires both soluble and cognate signaling between B-lineage cells and their microenvironment. Signals may impart a positive stimulus that allows a B-lineage cell to continue its programmed development, or a negative stimulus that instructs the cell to arrest its current developmental pathway. To date, numerous stimulatory and inhibitory signals have been found to influence B cell responsiveness including IL-2, IL-4, IL-5, IL-6, IL-7, IL10, IL-13, IL-14 and IL-15. Interestingly, these signals are by themselves weak effectors but can, in combination with various co-stimulatory proteins, induce activation, proliferation, differentiation, homing, tolerance and death among B cell populations.

[2556] One of the best studied classes of B-cell co-stimulatory proteins is the TNF-superfamily. Within this family CD40, CD27, and CD30 along with their respective ligands CD154, CD70, and CD153 have been found to regulate a variety of immune responses. Assays which allow for the detection and/or observation of the proliferation and differentiation of these B-cell populations and their precursors are valuable tools in determining the effects various proteins may have on these B-cell populations in terms of proliferation and differentiation. Listed below are two assays designed to allow for the detection of the differentiation, proliferation, or inhibition of B-cell populations and their precursors.

[2557] In Vitro Assay—Purified polypeptides of the invention, or truncated forms thereof, is assessed for its ability to induce activation, proliferation, differentiation or inhibition and/or death in B-cell populations and their precursors. The activity of the polypeptides of the invention on purified human tonsillar B cells, measured qualitatively over the dose range from 0.1 to 10,000 ng/mL, is assessed in a standard B-lymphocyte co-stimulation assay in which purified tonsillar B cells are cultured in the presence of either formalin-fixed Staphylococcus aureus Cowan I (SAC) or immobilized anti-human IgM antibody as the priming agent. Second signals such as IL-2 and IL-15 synergize with SAC and IgM crosslinking to elicit B cell proliferation as measured by tritiated-thymidine incorporation. Novel synergizing agents can be readily identified using this assay. The assay involves isolating human tonsillar B cells by magnetic bead (MACS) depletion of CD3-positive cells. The resulting cell population is greater than 95% B cells as assessed by expression of CD45R(B220).

[2558] Various dilutions of each sample are placed into individual wells of a 96-well plate to which are added 10⁵ B-cells suspended in culture medium (RPMI 1640 containing 10% FBS, 5×10⁻⁵M 2ME, 100U/ml penicillin, 10 ug/ml streptomycin, and 10⁻⁵ dilution of SAC) in a total volume of 150 ul. Proliferation or inhibition is quantitated by a 20 h pulse (1 uCi/well) with 3H-thymidine (6.7 Ci/mM) beginning 72 h post factor addition. The positive and negative controls are IL2 and medium respectively.

[2559] In Vivo Assay—BALB/c mice are injected (i.p.) twice per day with buffer only, or 2 mg/Kg of a polypeptide of the invention, or truncated forms thereof. Mice receive this treatment for 4 consecutive days, at which time they are sacrificed and various tissues and serum collected for analyses. Comparison of H&E sections from normal spleens and spleens treated with polypeptides of the invention identify the results of the activity of the polypeptides on spleen cells, such as the diffusion of peri-arterial lymphatic sheaths, and/or significant increases in the nucleated cellularity of the red pulp regions, which may indicate the activation of the differentiation and proliferation of B-cell populations. Immunohistochemical studies using a B cell marker, anti-CD45R(B220), are used to determine whether any physiological changes to splenic cells, such as splenic disorganization, are due to increased B-cell representation within loosely defined B-cell zones that infiltrate established T-cell regions.

[2560] Flow cytometric analyses of the spleens from mice treated with polypeptide is used to indicate whether the polypeptide specifically increases the proportion of ThB+, CD45R(B220)dull B cells over that which is observed in control mice.

[2561] Likewise, a predicted consequence of increased mature B-cell representation in vivo is a relative increase in serum Ig titers. Accordingly, serum IgM and IgA levels are compared between buffer and polypeptide-treated mice.

[2562] The studies described in this example tested activity of a polypeptide of the invention. However, one skilled in the art could easily modify the exemplified studies to test the activity of polynucleotides of the invention (e.g., gene therapy), agonists, and/or antagonists of polynucleotides or polypeptides of the invention.

### Example 33

### T Cell Proliferation Assay

[2563] Proliferation Assay for Resting PBLs.

[2564] A CD3-induced proliferation assay is performed on PBMCs and is measured by the uptake of ³H-thymidine. The assay is performed as follows. Ninety-six well plates are coated with 100 microliters per well of mAb to CD3 (HIT3a, Pharmingen) or isotype-matched control mAb (B33.1) overnight at 4 C (1 microgram/ml in 0.05M bicarbonate buffer, pH 9.5), then washed three times with PBS. PBMC are isolated by F/H gradient centrifugation from human peripheral blood and added to quadruplicate wells (5×10⁴/well) of mAb coated plates in RPMI containing 110% FCS and P/S in the presence of varying concentrations of TNF Delta and/or TNF Epsilon protein (total volume 200 microliters). Relevant protein buffer and medium alone are controls. After 48 hr. culture at 37 C, plates are spun for 2 min. at 1000 rpm and 100 microliters of supernatant is removed and stored −20 C for measurement of IL-2 (or other cytokines) if effect on proliferation is observed. Wells are supplemented with 100 microliters of medium containing 0.5 microcuries of ³H-thymidine and cultured at 37 C for 18-24 hr. Wells are harvested and incorporation of ³H-thymidine used as a measure of proliferation. Anti-CD3 alone is the positive control for proliferation. IL-2 (100 U/ml) is also used as a control which enhances proliferation. Control antibody which does not induce proliferation of T cells is used as the negative controls for the effects of TNF Delta and/or TNF Epsilon proteins.

[2565] Alternatively, a proliferation assay on resting PBL (peripheral blood lymphocytes) is measured by the up-take of ³H-thymidine. The assay is performed as follows. PBMC are isolated by Ficoll (LSM, ICN Biotechnologies, Aurora, Ohio) gradient centrifugation from human peripheral blood, and are cultured overnight in 10% (Fetal Calf Serum, Biofluids, Rockville, Md.)/RPMI (Gibco BRL, Gaithersburg, Md.). This overnight incubation period allows the adherent cells to attach to the plastic, which results in a lower background in the assay as there are fewer cells that can act as antigen presenting cells or that might be producing growth factors. The following day the non-adherent cells are collected, washed and used in the proliferation assay. The assay is performed in a 96 well plate using 2×10⁴ cells/well in a final volume of 200 microliters. The supernatants (e.g., CHO or 293T supernatants) expressing the protein of interest are tested at a 30% final dilution, therefore 60 ul are added to 140 ul of 10% FCS/RPMI containing the cells. Control supernatants are used at the same final dilution and express the following proteins: vector (negative control), IL-2 (*), IFN, TNF, IL-10 and TR2. In addition to the control supernatants, recombinant human IL-2 (R & D Systems, Minneapolois, Minn.) at a final concentration of 100 ng/ml is also used. After 24 hours of culture, each well is pulsed with 1 uCi of ³H-thymidine (Nen, Boston, Mass.). Cells are then harvested 20 hours following pulsing and incorporation of ³H-thymidine is used as a measure of proliferation. Results are expressed as an average of triplicate samples plus or minus standard error. (*) The amount of the control cytokines IL-2, IFN, TNF and IL-10 produced in each transfection varies between 300 μg to 5 ng/ml.

[2566] Costimulation Assay.

[2567] A costimulation assay on resting PBL (peripheral blood lymphocytes) is performed in the presence of immobilized antibodies to CD3 and CD28. The use of antibodies specific for the invariant regions of CD3 mimic the induction of T cell activation that would occur through stimulation of the T cell receptor by an antigen. Cross-linking of the TCR (first signal) in the absence of a costimulatory signal (second signal) causes very low induction of proliferation and will eventually result in a state of “anergy”, which is characterized by the absence of growth and inability to produce cytokines. The addition of a costimulatory signal such as an antibody to CD28, which mimics the action of the costimulatory molecule. B7-1 expressed on activated APCs, results in enhancement of T cell responses including cell survival and production of IL-2. Therefore this type of assay allows to detect both positive and negative effects caused by addition of supernatants expressing the proteins of interest on T cell proliferation.

[2568] The assay is performed as follows. Ninety-six well plates are coated with 100 ng/ml anti-CD3 and 5 ug/ml anti-CD28 (Pharmingen, San Diego, Calif.) in a final volume of 100 ul and incubated overnight at 4C. Plates are washed twice with PBS before use. PBMC are isolated by Ficoll (LSM, ICN Biotechnologies, Aurora, Ohio) gradient centrifugation from human peripheral blood, and are cultured overnight in 10% FCS (Fetal Calf Serum, Biofluids, Rockville, Md.)/RPMI (Gibco BRL, Gaithersburg, Md.). This overnight incubation period allows the adherent cells to attach to the plastic, which results in a lower background in the assay as there are fewer cells that can act as antigen presenting cells or that might be producing growth factors. The following day the non adherent cells are collected, washed and used in the proliferation assay. The assay is performed in a 96 well plate using 2×10⁴ cells/well in a final volume of 200 ul. The supernatants (e.g., CHO or 293T supernatants) expressing the protein of interest are tested at a 30% final dilution, therefore 60 ul are added to 140 ul of 10% FCS/RPMI containing the cells. Control supernatants are used at the same final dilution and express the following proteins: vector only (negative control), IL-2, IFN, TNF, IL-10 and TR2. In addition to the control supernatants recombinant human IL-2 (R & D Systems, Minneapolis, Minn.) at a final concentration of 10 ng/ml is also used. After 24 hours of culture, each well is pulsed with 1 uCi of ³H-thymidine (Nen, Boston, Mass.). Cells are then harvested 20 hours following pulsing and incorporation of ³H-thymidine is used as a measure of proliferation. Results are expressed as an average of triplicate samples plus or minus standard error.

[2569] Costimulation Assay: IFN γ and IL-2 ELISA

[2570] The assay is performed as follows. Twenty-four well plates are coated with either 300 ng/ml or 600 ng/ml anti-CD3 and 5 ug/ml anti-CD28 (Pharmingen, San Diego, Calif.) in a final volume of 500 ul and incubated overnight at 4C. Plates are washed twice with PBS before use. PBMC are isolated by Ficoll (LSM, ICN Biotechnologies, Aurora, Ohio) gradient centrifugation from human peripheral blood, and are cultured overnight in 10% FCS (Fetal Calf Serum, Biofluids, Rockville, Md.)/RPMI (Gibco BRL, Gaithersburg, Md.). This overnight incubation period allows the adherent cells to attach to the plastic, which results in a lower background in the assay as there are fewer cells that can act as antigen presenting cells or that might be producing growth factors. The following day the non adherent cells are collected, washed and used in the costimulation assay. The assay is performed in the pre-coated twenty-four well plate using 1×10⁵ cells/well in a final volume of 900 ul. The supernatants (293T supernatants) expressing the protein of interest are tested at a 30% final dilution, therefore 300 ul are added to 600 ul of 10% FCS/RPMI containing the cells. Control supernatants are used at the same final dilution and express the following proteins: vector only (negative control), IL-2, IFN, IL-12 and IL-18. In addition to the control supernatants recombinant human IL-2 (all cytokines were purchased from R & D Systems, Minneapolis, Minn.) at a final concentration of 10 ng/ml, IL-12 at a final concentration of 1 ng/ml and IL-18 at a final concentration of 50 ng/ml are also used. Controls and unknown samples are tested in duplicate. Supernatant samples (250 ul) are collected 2 days and 5 days after the beginning of the assay. ELISAs to test for IFN and IL-2 secretion are performed using kits purchased from R & D Systems, (Minneapolis, Minn.). Results are expressed as an average of duplicate samples plus or minus standard error.

[2571] Proliferation Assay for Preactivated-Resting T Cells.

[2572] A proliferation assay on preactivated-resting T cells is performed on cells that are previously activated with the lectin phytohemagglutinin (PHA). Lectins are polymeric plant proteins that can bind to residues on T cell surface glycoproteins including the TCR and act as polyclonal activators. PBLs treated with PHA and then cultured in the presence of low doses of IL-2 resemble effector T cells. These cells are generally more sensitive to further activation induced by growth factors such as IL-2. This is due to the expression of high affinity IL-2 receptors that allows this population to respond to amounts of IL-2 that are 100 fold lower than what would have an effect on a naive T cell. Therefore the use of this type of cells might enable to detect the effect of very low doses of an unknown growth factor, that would not be sufficient to induce proliferation on resting (naive) T cells.

[2573] The assay is performed as follows. PBMC are isolated by F/H gradient centrifugation from human peripheral blood, and are cultured in 10% FCS (Fetal Calf Serum, Biofluids, Rockville, Md.)/RPMI (Gibco BRL, Gaithersburg, Md.) in the presence of 2 ug/ml PHA (Sigma, Saint Louis, Mo.) for three days. The cells are then washed in PBS and cultured in 10% FCS/RPMI in the presence of 5 ng/ml of human recombinant IL-2 (R & D Systems, Minneapolis, Minn.) for 3 days. The cells are washed and rested in starvation medium (1%FCS/RPMI) for 16 hours prior to the beginning of the proliferation assay. An aliquot of the cells is analyzed by FACS to determine the percentage of T cells (CD3 positive cells) present; this usually ranges between 93-97% depending on the donor. The assay is performed in a 96 well plate using 2×10⁴ cells/well in a final volume of 200 ul. The supernatants (e.g., CHO or 293T supernatants) expressing the protein of interest are tested at a 30% final dilution, therefore 60 ul are added to 140 ul of in 10% FCS/RPMI containing the cells. Control supernatants are used at the same final dilution and express the following proteins: vector (negative control), IL-2, IFN, TNF, IL-10 and TR2. In addition to the control supernatants recombinant human IL-2 at a final concentration of 10 ng/ml is also used. After 24 hours of culture, each well is pulsed with 1 uCi of ³H-thymidine (Nen, Boston, Mass.). Cells are then harvested 20 hours following pulsing and incorporation of ³H-thymidine is used as a measure of proliferation. Results are expressed as an average of triplicate samples plus or minus standard error.

[2574] The studies described in this example test activity of polypeptides of the invention. However, one skilled in the art could easily modify the exemplified studies to test the activity of polynucleotides of the invention (e.g., gene therapy), agonists, and/or antagonists of polynucleotides or polypeptides of the invention.

### Example 34

### Effect of Polypeptides of the Invention on the Expression of MHC Class II, Costimulatory and Adhesion Molecules and Cell Differentiation of Monocytes and Monocyte-Derived Human Dendritic Cells

[2575] Dendritic cells are generated by the expansion of proliferating precursors found in the peripheral blood: adherent PBMC or elutriated monocytic fractions are cultured for 7-10 days with GM-CSF (50 ng/ml) and IL-4 (20 ng/ml). These dendritic cells have the characteristic phenotype of immature cells (expression of CD1, CD80, CD86, CD40 and MHC class II antigens). Treatment with activating factors, such as TNF-α, causes a rapid change in surface phenotype (increased expression of MHC class I and II, costimulatory and adhesion molecules, downregulation of FCγRII, upregulation of CD83). These changes correlate with increased antigen-presenting capacity and with functional maturation of the dendritic cells.

[2576] FACS analysis of surface antigens is performed as follows. Cells are treated 1-3 days with increasing concentrations of polypeptides of the invention or LPS (positive control), washed with PBS containing 1% BSA and 0.02 mM sodium azide, and then incubated with 1:20 dilution of appropriate FITC- or PE-labeled monoclonal antibodies for 30 minutes at 4 degrees C. After an additional wash, the labeled cells are analyzed by flow cytometry on a FACScan (Becton Dickinson).

[2577] Effect on the production of cytokines. Cytokines generated by dendritic cells, in particular IL-12, are important in the initiation of T-cell dependent immune responses. IL-12 strongly influences the development of Th1 helper T-cell immune response, and induces cytotoxic T and NK cell function. An ELISA is used to measure the IL-12 release as follows. Dendritic cells (10⁶/ml) are treated with increasing concentrations of polypeptides of the invention for 24 hours. LPS (100 ng/ml) is added to the cell culture as positive control. Supernatants from the cell cultures are then collected and analyzed for IL-12 content using commercial ELISA kit (e.g, R & D Systems (Minneapolis, Minn.)). The standard protocols provided with the kits are used.

[2578] Effect on the expression of MHC Class II, costimulatory and adhesion molecules. Three major families of cell surface antigens can be identified on monocytes: adhesion molecules, molecules involved in antigen presentation, and Fc receptor. Modulation of the expression of MHC class II antigens and other costimulatory molecules, such as B7 and ICAM-1, may result in changes in the antigen presenting capacity of monocytes and ability to induce T cell activation. Increase expression of Fc receptors may correlate with improved monocyte cytotoxic activity, cytokine release and phagocytosis.

[2579] FACS analysis is used to examine the surface antigens as follows. Monocytes are treated 1-5 days with increasing concentrations of polypeptides of the invention or LPS (positive control), washed with PBS containing 1% BSA and 0.02 mM sodium azide, and then incubated with 1:20 dilution of appropriate FITC- or PE-labeled monoclonal antibodies for 30 minutes at 4 degreesC. After an additional wash, the labeled cells are analyzed by flow cytometry on a FACScan (Becton Dickinson).

[2580] Monocyte activation and/or increased survival. Assays for molecules that activate (or alternatively, inactivate) monocytes and/or increase monocyte survival (or alternatively, decrease monocyte survival) are known in the art and may routinely be applied to determine whether a molecule of the invention functions as an inhibitor or activator of monocytes. Polypeptides, agonists, or antagonists of the invention can be screened using the three assays described below. For each of these assays, Peripheral blood mononuclear cells (PBMC) are purified from single donor leukopacks (American Red Cross, Baltimore, Md.) by centrifugation through a Histopaque gradient (Sigma). Monocytes are isolated from PBMC by counterflow centrifugal elutriation.

[2581] Monocyte Survival Assay. Human peripheral blood monocytes progressively lose viability when cultured in absence of serum or other stimuli. Their death results from internally regulated process (apoptosis). Addition to the culture of activating factors, such as TNF-alpha dramatically improves cell survival and prevents DNA fragmentation. Propidium iodide (PI) staining is used to measure apoptosis as follows. Monocytes are cultured for 48 hours in polypropylene tubes in serum-free medium (positive control), in the presence of 100 ng/ml TNF-alpha (negative control), and in the presence of varying concentrations of the compound to be tested. Cells are suspended at a concentration of 2×10⁶/ml in PBS containing PI at a final concentration of 5 μg/ml, and then incubaed at room temperature for 5 minutes before FACScan analysis. PI uptake has been demonstrated to correlate with DNA fragmentation in this experimental paradigm.

[2582] Effect on cytokine release. An important function of monocytes/macrophages is their regulatory activity on other cellular populations of the immune system through the release of cytokines after stimulation. An ELISA to measure cytokine release is performed as follows. Human monocytes are incubated at a density of 5×10⁵ cells/ml with increasing concentrations of the a polypeptide of the invention and under the same conditions, but in the absence of the polypeptide. For IL-12 production, the cells are primed overnight with IFN (100 U/ml) in presence of a polypeptide of the invention. LPS (10 ng/ml) is then added. Conditioned media are collected after 24 h and kept frozen until use. Measurement of TNF-alpha, IL-10, MCP-1 and IL-8 is then performed using a commercially available ELISA kit (e.g, R & D Systems (Minneapolis, Minn.)) and applying the standard protocols provided with the kit.

[2583] Oxidative burst. Purified monocytes are plated in 96-w plate at 2-1×10⁵ cell/well. Increasing concentrations of polypeptides of the invention are added to the wells in a total volume of 0.2 ml culture medium (RPMI 1640+10% FCS, glutamine and antibiotics). After 3 days incubation, the plates are centrifuged and the medium is removed from the wells. To the macrophage monolayers, 0.2 ml per well of phenol red solution (140 mM NaCl, 10 mM potassium phosphate buffer pH 7.0, 5.5 mM dextrose, 0.56 mM phenol red and 19 U/ml of HRPO) is added, together with the stimulant (200 nM PMA). The plates are incubated at 37° C. for 2 hours and the reaction is stopped by adding 20 μl 1N NaOH per well. The absorbance is read at 610 nm. To calculate the amount of H₂O₂ produced by the macrophages, a standard curve of a H₂O₂ solution of known molarity is performed for each experiment.

[2584] The studies described in this example tested activity of a polypeptide of the invention. However, one skilled in the art could easily modify the exemplified studies to test the activity of polypeptides, polynucleotides (e.g., gene therapy), agonists, and/or antagonists of the invention.

### Example 35

### Biological Effects of Polypeptides of the Invention

[2585] Astrocyte and Neuronal Assays

[2586] Recombinant polypeptides of the invention, expressed in Escherichia coli and purified as described above, can be tested for activity in promoting the survival, neurite outgrowth, or phenotypic differentiation of cortical neuronal cells and for inducing the proliferation of glial fibrillary acidic protein immunopositive cells, astrocytes. The selection of cortical cells for the bioassay is based on the prevalent expression of FGF-1 and FGF-2 in cortical structures and on the previously reported enhancement of cortical neuronal survival resulting from FGF-2 treatment. A thymidine incorporation assay, for example, can be used to elucidate a polypeptide of the invention's activity on these cells.

[2587] Moreover, previous reports describing the biological effects of FGF-2 (basic FGF) on cortical or hippocampal neurons in vitro have demonstrated increases in both neuron survival and neurite outgrowth (Walicke et al., “Fibroblast growth factor promotes survival of dissociated hippocampal neurons and enhances neurite extension.” Proc. Natl. Acad. Sci. USA 83:3012-3016. (1986), assay herein incorporated by reference in its entirety). However, reports from experiments done on PC-12 cells suggest that these two responses are not necessarily synonymous and may depend on not only which FGF is being tested but also on which receptor(s) are expressed on the target cells. Using the primary cortical neuronal culture paradigm, the ability of a polypeptide of the invention to induce neurite outgrowth can be compared to the response achieved with FGF-2 using, for example, a thymidine incorporation assay.

[2588] Fibroblast and Endothelial Cell Assays

[2589] Human lung fibroblasts are obtained from Clonetics (San Diego, Calif.) and maintained in growth media from Clonetics. Dermal microvascular endothelial cells are obtained from Cell Applications (San Diego, Calif.). For proliferation assays, the human lung fibroblasts and dermal microvascular endothelial cells can be cultured at 5,000 cells/well in a 96-well plate for one day in growth medium. The cells are then incubated for one day in 0.1% BSA basal medium. After replacing the medium with fresh 0.1% BSA medium, the cells are incubated with the test proteins for 3 days. Alamar Blue (Alamar Biosciences, Sacramento, Calif.) is added to each well to a final concentration of 10%. The cells are incubated for 4 hr. Cell viability is measured by reading in a Cyto Fluor fluorescence reader. For the PGE₂ assays, the human lung fibroblasts are cultured at 5,000 cells/well in a 96-well plate for one day. After a medium change to 0.1% BSA basal medium, the cells are incubated with FGF-2 or polypeptides of the invention with or without IL-1α for 24 hours. The supernatants are collected and assayed for PGE₂ by EIA kit (Cayman, Ann Arbor, Mich.). For the IL-6 assays, the human lung fibroblasts are cultured at 5,000 cells/well in a 96-well plate for one day. After a medium change to 0.1% BSA basal medium, the cells are incubated with FGF-2 or with or without polypeptides of the invention IL-1α for 24 hours. The supernatants are collected and assayed for IL-6 by ELISA kit (Endogen, Cambridge, Mass.).

[2590] Human lung fibroblasts are cultured with FGF-2 or polypeptides of the invention for 3 days in basal medium before the addition of Alamar Blue to assess effects on growth of the fibroblasts. FGF-2 should show a stimulation at 10-2500 ng/ml which can be used to compare stimulation with polypeptides of the invention.

[2591] Parkinson Models.

[2592] The loss of motor function in Parkinson's disease is attributed to a deficiency of striatal dopamine resulting from the degeneration of the nigrostriatal dopaminergic projection neurons. An animal model for Parkinson's that has been extensively characterized involves the systemic administration of 1-methyl-4 phenyl 1,2,3,6-tetrahydropyridine (MPTP). In the CNS, MPTP is taken-up by astrocytes and catabolized by monoamine oxidase B to 1-methyl-4-phenyl pyridine (MPP⁺) and released. Subsequently, MPP⁺ is actively accumulated in dopaminergic neurons by the high-affinity reuptake transporter for dopamine. MPP⁺ is then concentrated in mitochondria by the electrochemical gradient and selectively inhibits nicotidamide adenine disphosphate: ubiquinone oxidoreductionase (complex I), thereby interfering with electron transport and eventually generating oxygen radicals.

[2593] It has been demonstrated in tissue culture paradigms that FGF-2 (basic FGF) has trophic activity towards nigral dopaminergic neurons (Ferrari et al., Dev. Biol. 1989). Recently, Dr. Unsicker's group has demonstrated that administering FGF-2 in gel foam implants in the striatum results in the near complete protection of nigral dopaminergic neurons from the toxicity associated with MPTP exposure (Otto and Unsicker, J. Neuroscience, 1990).

[2594] Based on the data with FGF-2, polypeptides of the invention can be evaluated to determine whether it has an action similar to that of FGF-2 in enhancing dopaminergic neuronal survival in vitro and it can also be tested in vivo for protection of dopaminergic neurons in the striatum from the damage associated with MPTP treatment. The potential effect of a polypeptide of the invention is first examined in vitro in a dopaminergic neuronal cell culture paradigm. The cultures are prepared by dissecting the midbrain floor plate from gestation day 14 Wistar rat embryos. The tissue is dissociated with trypsin and seeded at a density of 200,000 cells/cm² on polyorthinine-laminin coated glass coverslips. The cells are maintained in Dulbecco's Modified Eagle's medium and F12 medium containing hormonal supplements (N1). The cultures are fixed with paraformaldehyde after 8 days in vitro and are processed for tyrosine hydroxylase, a specific marker for dopminergic neurons, immunohistochemical staining. Dissociated cell cultures are prepared from embryonic rats. The culture medium is changed every third day and the factors are also added at that time.

[2595] Since the dopaminergic neurons are isolated from animals at gestation day 14, a developmental time which is past the stage when the dopaminergic precursor cells are proliferating, an increase in the number of tyrosine hydroxylase immunopositive neurons would represent an increase in the number of dopaminergic neurons surviving in vitro. Therefore, if a polypeptide of the invention acts to prolong the survival of dopaminergic neurons, it would suggest that the polypeptide may be involved in Parkinson's Disease.

[2596] The studies described in this example tested activity of a polypeptide of the invention. However, one skilled in the art could easily modify the exemplified studies to test the activity of polynucleotides (e.g., gene therapy), agonists, and/or antagonists of the invention.

### Example 36

### The Effect of Polypeptides of the Invention on the Growth of Vascular Endothelial Cells

[2597] On day 1, human umbilical vein endothelial cells (HUVEC) are seeded at 2-5×10⁴ cells/35 mm dish density in M199 medium containing 4% fetal bovine serum (FBS), 16 units/ml heparin, and 50 units/ml endothelial cell growth supplements (ECGS, Biotechnique, Inc.). On day 2, the medium is replaced with M199 containing 10% FBS, 8 units/ml heparin. A polypeptide having the amino acid sequence of SEQ ID NO:Y, and positive controls, such as VEGF and basic FGF (bFGF) are added, at varying concentrations. On days 4 and 6, the medium is replaced. On day 8, cell number is determined with a Coulter Counter.

[2598] An increase in the number of HUVEC cells indicates that the polypeptide of the invention may proliferate vascular endothelial cells.

[2599] The studies described in this example tested activity of a polypeptide of the invention. However, one skilled in the art could easily modify the exemplified studies to test the activity of polynucleotides (e.g., gene therapy), agonists, and/or antagonists of the invention.

### Example 37

### Stimulatory Effect of Polypeptides of the Invention on the Proliferation of Vascular Endothelial Cells

[2600] For evaluation of mitogenic activity of growth factors, the colorimetric MTS (3-(4,5-dimethylthiazol-2-yl)-5-(3-carboxymethoxyphenyl)-2-(4-sulfophenyl)₂H-tetrazolium) assay with the electron coupling reagent PMS (phenazine methosulfate) was performed (CellTiter 96 AQ, Promega). Cells are seeded in a 96-well plate (5,000 cells/well) in 0.1 mL serum-supplemented medium and are allowed to attach overnight. After serum-starvation for 12 hours in 0.5% FBS, conditions (bFGF, VEGF₁₆₅ or a polypeptide of the invention in 0.5% FBS) with or without Heparin (8 U/ml) are added to wells for 48 hours. 20 mg of MTS/PMS mixture (1:0.05) are added per well and allowed to incubate for 1 hour at 37° C. before measuring the absorbance at 490 nm in an ELISA plate reader. Background absorbance from control wells (some media, no cells) is subtracted, and seven wells are performed in parallel for each condition. See, Leak et al. In Vitro Cell. Dev. Biol. 30A:512-518 (1994).

[2601] The studies described in this example tested activity of a polypeptide of the invention. However, one skilled in the art could easily modify the exemplified studies to test the activity of polynucleotides (e.g., gene therapy), agonists, and/or antagonists of the invention.

### Example 38

### Inhibition of PDGF-Induced Vascular Smooth Muscle Cell Proliferation Stimulatory Effect

[2602] HAoSMC proliferation can be measured, for example, by BrdUrd incorporation. Briefly, subconfluent, quiescent cells grown on the 4-chamber slides are transfected with CRP or FITC-labeled AT2-3LP. Then, the cells are pulsed with 10% calf serum and 6 mg/ml BrdUrd. After 24 h, immunocytochemistry is performed by using BrdUrd Staining Kit (Zymed Laboratories). In brief, the cells are incubated with the biotinylated mouse anti-BrdUrd antibody at 4 degrees C. for 2 h after being exposed to denaturing solution and then incubated with the streptavidin-peroxidase and diaminobenzidine. After counterstaining with hematoxylin, the cells are mounted for microscopic examination, and the BrdUrd-positive cells are counted. The BrdUrd index is calculated as a percent of the BrdUrd-positive cells to the total cell number. In addition, the simultaneous detection of the BrdUrd staining (nucleus) and the FITC uptake (cytoplasm) is performed for individual cells by the concomitant use of bright field illumination and dark field-UV fluorescent illumination. See, Hayashida et al., J. Biol. Chem. 6:271(36):21985-21992 (1996).

[2603] The studies described in this example tested activity of a polypeptide of the invention. However, one skilled in the art could easily modify the exemplified studies to test the activity of polynucleotides (e.g., gene therapy), agonists, and/or antagonists of the invention.

### Example 39

### Stimulation of Endothelial Migration

[2604] This example will be used to explore the possibility that a polypeptide of the invention may stimulate lymphatic endothelial cell migration.

[2605] Endothelial cell migration assays are performed using a 48 well microchemotaxis chamber (Neuroprobe Inc., Cabin John, MD; Falk, W., et al., J. Immunological Methods 1980;33:239-247). Polyvinylpyrrolidone-free polycarbonate filters with a pore size of 8 um (Nucleopore Corp. Cambridge, Mass.) are coated with 0.1% gelatin for at least 6 hours at room temperature and dried under sterile air. Test substances are diluted to appropriate concentrations in M199 supplemented with 0.25% bovine serum albumin (BSA), and 25 ul of the final dilution is placed in the lower chamber of the modified Boyden apparatus. Subconfluent, early passage (2-6) HUVEC or BMEC cultures are washed and trypsinized for the minimum time required to achieve cell detachment. After placing the filter between lower and upper chamber, 2.5×10⁵ cells suspended in 50 ul M199 containing 1% FBS are seeded in the upper compartment. The apparatus is then incubated for 5 hours at 37° C. in a humidified chamber with 5% CO₂ to allow cell migration. After the incubation period, the filter is removed and the upper side of the filter with the non-migrated cells is scraped with a rubber policeman. The filters are fixed with methanol and stained with a Giemsa solution (Diff-Quick, Baxter, McGraw Park, Ill.). Migration is quantified by counting cells of three random high-power fields (40×) in each well, and all groups are performed in quadruplicate.

[2606] The studies described in this example tested activity of a polypeptide of the invention. However, one skilled in the art could easily modify the exemplified studies to test the activity of polynucleotides (e.g., gene therapy), agonists, and/or antagonists of the invention.

### Example 40

### Stimulation of Nitric Oxide Production by Endothelial Cells

[2607] Nitric oxide released by the vascular endothelium is believed to be a mediator of vascular endothelium relaxation. Thus, activity of a polypeptide of the invention can be assayed by determining nitric oxide production by endothelial cells in response to the polypeptide.

[2608] Nitric oxide is measured in 96-well plates of confluent microvascular endothelial cells after 24 hours starvation and a subsequent 4 hr exposure to various levels of a positive control (such as VEGF-1) and the polypeptide of the invention. Nitric oxide in the medium is determined by use of the Griess reagent to measure total nitrite after reduction of nitric oxide-derived nitrate by nitrate reductase. The effect of the polypeptide of the invention on nitric oxide release is examined on HUVEC.

[2609] Briefly, NO release from cultured HUvEC monolayer is measured with a NO-specific polarographic electrode connected to a NO meter (Iso-NO, World Precision Instruments Inc.) (1049). Calibration of the NO elements is performed according to the following equation:

2KNO2+2KI+2H₂SO₄ 6 2NO+I₂+2H₂O+2K₂SO₄

[2610] The standard calibration curve is obtained by adding graded concentrations of KNO2 (0, 5, 10, 25, 50, 100, 250, and 500 mol/L) into the calibration solution containing KI and H₂SO₄. The specificity of the Iso-NO electrode to NO is previously determined by measurement of NO from authentic NO gas (1050). The culture medium is removed and HUVECs are washed twice with Dulbecco's phosphate buffered saline. The cells are then bathed in 5 ml of filtered Krebs-Henseleit solution in 6-well plates, and the cell plates are kept on a slide warmer (Lab Line Instruments Inc.) To maintain the temperature at 37° C. The NO sensor probe is inserted vertically into the wells, keeping the tip of the electrode 2 mm under the surface of the solution, before addition of the different conditions. S-nitroso acetyl penicillamin (SNAP) is used as a positive control. The amount of released NO is expressed as picomoles per 1×06 endothelial cells. All values reported are means of four to six measurements in each group (number of cell culture wells). See, Leak et al Biochem. and Biophys. Res. Comm. 21 7:96-105 (1995).

[2611] The studies described in this example tested activity of polypeptides of the invention. However, one skilled in the art could easily modify the exemplified studies to test the activity of polynucleotides (e.g., gene therapy), agonists, and/or antagonists of the invention.

### Example 41

### Effect of Polypepides of the Invention on Cord Formation in Angiogenesis

[2612] Another step in angiogenesis is cord formation, marked by differentiation of endothelial cells. This bioassay measures the ability of microvascular endothelial cells to form capillary-like structures (hollow structures) when cultured in vitro.

[2613] CADMEC (microvascular endothelial cells) are purchased from Cell Applications, Inc. as proliferating (passage 2) cells and are cultured in Cell Applications' CADMEC Growth Medium and used at passage 5. For the in vitro angiogenesis assay, the wells of a 48-well cell culture plate are coated with Cell Applications' Attachment Factor Medium (200 ml/well) for 30 min. at 37° C. CADMEC are seeded onto the coated wells at 7,500 cells/well and cultured overnight in Growth Medium. The Growth Medium is then replaced with 300 mg Cell Applications' Chord Formation Medium containing control buffer or a polypeptide of the invention (0.1 to 100 ng/ml) and the cells are cultured for an additional 48 hr. The numbers and lengths of the capillary-like chords are quantitated through use of the Boeckeler VIA-170 video image analyzer. All assays are done in triplicate.

[2614] Commercial (R&D) VEGF (50 ng/ml) is used as a positive control. b-esteradiol (1 ng/ml) is used as a negative control. The appropriate buffer (without protein) is also utilized as a control.

[2615] The studies described in this example tested activity of a polypeptide of the invention. However, one skilled in the art could easily modify the exemplified studies to test the activity of polynucleotides (e.g., gene therapy), agonists, and/or antagonists of the invention.

### Example 42

### Angiogenic Effect on Chick Chorioallantoic Membrane

[2616] Chick chorioallantoic membrane (CAM) is a well-established system to examine angiogenesis. Blood vessel formation on CAM is easily visible and quantifiable. The ability of polypeptides of the invention to stimulate angiogenesis in CAM can be examined.

[2617] Fertilized eggs of the White Leghorn chick (Gallus gallus) and the Japanese qual (Coturnix coturnix) are incubated at 37.8° C. and 80% humidity. Differentiated CAM of 16-day-old chick and 13-day-old qual embryos is studied with the following methods.

[2618] On Day 4 of development, a window is made into the egg shell of chick eggs. The embryos are checked for normal development and the eggs sealed with cellotape. They are further incubated until Day 13. Thermanox coverslips (Nunc, Naperville, Ill.) are cut into disks of about 5 mm in diameter. Sterile and salt-free growth factors are dissolved in distilled water and about 3.3 mg/5 ml are pipetted on the disks. After air-drying, the inverted disks are applied on CAM. After 3 days, the specimens are fixed in 3% glutaraldehyde and 2% formaldehyde and rinsed in 0.12 M sodium cacodylate buffer. They are photographed with a stereo microscope [Wild M8] and embedded for semi- and ultrathin sectioning as described above. Controls are performed with carrier disks alone.

[2619] The studies described in this example tested activity of a polypeptide of the invention. However, one skilled in the art could easily modify the exemplified studies to test the activity of polynucleotides (e.g., gene therapy), agonists, and/or antagonists of the invention.

### Example 43

### Angiogenesis Assay Using a Matrigel Implant in Mouse

[2620] In vivo angiogenesis assay of a polypeptide of the invention measures the ability of an existing capillary network to form new vessels in an implanted capsule of murine extracellular matrix material (Matrigel). The protein is mixed with the liquid Matrigel at 4 degree C. and the mixture is then injected subcutaneously in mice where it solidifies. After 7 days, the solid “plug” of Matrigel is removed and examined for the presence of new blood vessels. Matrigel is purchased from Becton Dickinson Labware/Collaborative Biomedical Products.

[2621] When thawed at 4 degree C. the Matrigel material is a liquid. The Matrigel is mixed with a polypeptide of the invention at 150 ng/ml at 4 degrees C. and drawn into cold 3 ml syringes. Female C57B1/6 mice approximately 8 weeks old are injected with the mixture of Matrigel and experimental protein at 2 sites at the midventral aspect of the abdomen (0.5 ml/site). After 7 days, the mice are sacrificed by cervical dislocation, the Matrigel plugs are removed and cleaned (i.e., all clinging membranes and fibrous tissue is removed). Replicate whole plugs are fixed in neutral buffered 10% formaldehyde, embedded in paraffin and used to produce sections for histological examination after staining with Masson's Trichrome. Cross sections from 3 different regions of each plug are processed. Selected sections are stained for the presence of vWF. The positive control for this assay is bovine basic FGF (150 ng/ml). Matrigel alone is used to determine basal levels of angiogenesis.

[2622] The studies described in this example tested activity of a polypeptide of the invention. However, one skilled in the art could easily modify the exemplified studies to test the activity of polynucleotides (e.g., gene therapy), agonists, and/or antagonists of the invention.

### Example 44

### Rescue of Ischemia in Rabbit Lower Limb Model

[2623] To study the in vivo effects of polynucleotides and polypeptides of the invention on ischemia, a rabbit hindlimb ischemia model is created by surgical removal of one femoral arteries as described previously (Takeshita et al., Am J. Pathol 147:1649-1660 (1995)). The excision of the femoral artery results in retrograde propagation of thrombus and occlusion of the external iliac artery. Consequently, blood flow to the ischemic limb is dependent upon collateral vessels originating from the internal iliac artery (Takeshitaet al. Am J. Pathol 147:1649-1660 (1995)). An interval of 10 days is allowed forpost-operative recovery of rabbits and development of endogenous collateral vessels. At 10 day post-operatively (day 0), after performing a baseline angiogram, the internal iliac artery of the ischemic limb is transfected with 500 mg naked expression plasmid containing a polynucleotide of the invention by arterial gene transfer technology using a hydrogel-coated balloon catheter as described (Riessen et al. Hum Gene Ther. 4:749-758 (1993); Leclerc et al. J. Clin. Invest. 90: 936-944 (1992)). When a polypeptide of the invention is used in the treatment, a single bolus of 500 mg polypeptide of the invention or control is delivered into the internal iliac artery of the ischemic limb over a period of 1 min. through an infusion catheter. On day 30, various parameters are measured in these rabbits: (a) BP ratio—The blood pressure ratio of systolic pressure of the ischemic limb to that of normal limb; (b) Blood Flow and Flow Reserve—Resting FL: the blood flow during undilated condition and Max FL: the blood flow during fully dilated condition (also an indirect measure of the blood vessel amount) and Flow Reserve is reflected by the ratio of max FL: resting FL; (c) Angiographic Score—This is measured by the angiogram of collateral vessels. A score is determined by the percentage of circles in an overlaying grid that with crossing opacified arteries divided by the total number m the rabbit thigh; (d) Capillary density—The number of collateral capillaries determined in light microscopic sections taken from hindlimbs.

[2624] The studies described in this example tested activity of polynucleotides and polypeptides of the invention. However, one skilled in the art could easily modify the exemplified studies to test the agonists, and/or antagonists of the invention.

### Example 45

### Effect of Polypeptides of the Invention on Vasodilation

[2625] Since dilation of vascular endothelium is important in reducing blood pressure, the ability of polypeptides of the invention to affect the blood pressure in spontaneously hypertensive rats (SHR) is examined. Increasing doses (0, 10, 30, 100, 300, and 900 mg/kg) of the polypeptides of the invention are administered to 13-14 week old spontaneously hypertensive rats (SHR). Data are expressed as the mean+/−SEM. Statistical analysis are performed with a paired t-test and statistical significance is defined as p<0.05 vs. the response to buffer alone.

[2626] The studies described in this example tested activity of a polypeptide of the invention. However, one skilled in the art could easily modify the exemplified studies to test the activity of polynucleotides (e.g., gene therapy), agonists, and/or antagonists of the invention.

### Example 46

### Rat Ischemic Skin Flap Model

[2627] The evaluation parameters include skin blood flow, skin temperature, and factor VIII immunohistochemistry or endothelial alkaline phosphatase reaction. Expression of polypeptides of the invention, during the skin ischemia, is studied using in situ hybridization.

[2628] The study in this model is divided into three parts as follows:

[2629] Ischemic skin

[2630] Ischemic skin wounds

[2631] Normal wounds

[2632] The experimental protocol includes:

[2633] Raising a 3×4 cm, single pedicle full-thickness random skin flap (myocutaneous flap over the lower back of the animal).

[2634] An excisional wounding (4-6 mm in diameter) in the ischemic skin (skin-flap).

[2635] Topical treatment with a polypeptide of the invention of the excisional wounds (day 0, 1, 2, 3, 4 post-wounding) at the following various dosage ranges: 1 mg to 100 mg.

[2636] Harvesting the wound tissues at day 3, 5, 7, 10, 14 and 21 post-wounding for histological, immunohistochemical, and in situ studies.

[2637] The studies described in this example tested activity of a polypeptide of the invention. However, one skilled in the art could easily modify the exemplified studies to test the activity of polynucleotides (e.g., gene therapy), agonists, and/or antagonists of the invention.

### Example 47

### Peripheral Arterial Disease Model

[2638] Angiogenic therapy using a polypeptide of the invention is a novel therapeutic strategy to obtain restoration of blood flow around the ischemia in case of peripheral arterial diseases. The experimental protocol includes:

[2639] One side of the femoral artery is ligated to create ischemic muscle of the hindlimb, the other side of hindlimb serves as a control.

[2640] a polypeptide of the invention, in a dosage range of 20 mg-500 mg, is delivered intravenously and/or intramuscularly 3 times (perhaps more) per week for 2-3 weeks.

[2641] The ischemic muscle tissue is collected after ligation of the femoral artery at 1, 2, and 3 weeks for the analysis of expression of a polypeptide of the invention and histology. Biopsy is also performed on the other side of normal muscle of the contralateral hindlimb.

[2642] The studies described in this example tested activity of a polypeptide of the invention. However, one skilled in the art could easily modify the exemplified studies to test the activity of polynucleotides (e.g., gene therapy), agonists, and/or antagonists of the invention.

### Example 48

### Ischemic Myocardial Disease Model

[2643] A polypeptide of the invention is evaluated as a potent mitogen capable of stimulating the development of collateral vessels, and restructuring new vessels after coronary artery occlusion. Alteration of expression of the polypeptide is investigated in situ. The experimental protocol includes:

[2644] The heart is exposed through a left-side thoracotomy in the rat. Immediately, the left coronary artery is occluded with a thin suture (6-0) and the thorax is closed.

[2645] a polypeptide of the invention, in a dosage range of 20 mg-500 mg, is delivered intravenously and/or intramuscularly 3 times (perhaps more) per week for 2-4 weeks.

[2646] Thirty days after the surgery, the heart is removed and cross-sectioned for morphometric and in situ analyzes.

[2647] The studies described in this example tested activity of a polypeptide of the invention. However, one skilled in the art could easily modify the exemplified studies to test the activity of polynucleotides (e.g., gene therapy), agonists, and/or antagonists of the invention.

### Example 49

### Rat Corneal Wound Healing Model

[2648] This animal model shows the effect of a polypeptide of the invention on neovascularization. The experimental protocol includes:

[2649] Making a 1-1.5 mm long incision from the center of cornea into the stromal layer.

[2650] Inserting a spatula below the lip of the incision facing the outer corner of the eye.

[2651] Making a pocket (its base is 1-1.5 mm form the edge of the eye).

[2652] Positioning a pellet, containing 50 ng-5 ug of a polypeptide of the invention, within the pocket.

[2653] Treatment with a polypeptide of the invention can also be applied topically to the corneal wounds in a dosage range of 20 mg-500 mg (daily treatment for five days).

[2654] The studies described in this example tested activity of a polypeptide of the invention. However, one skilled in the art could easily modify the exemplified studies to test the activity of polynucleotides (e.g., gene therapy), agonists, and/or antagonists of the invention.

### Example 50

### Diabetic Mouse and Glucocorticoid-Impaired Wound Healing Models

[2655] Diabetic db+/db+ Mouse Model.

[2656] To demonstrate that a polypeptide of the invention accelerates the healing process, the genetically diabetic mouse model of wound healing is used. The full thickness wound healing model in the db+/db+ mouse is a well characterized, clinically relevant and reproducible model of impaired wound healing. Healing of the diabetic wound is dependent on formation of granulation tissue and re-epithelialization rather than contraction (Gartner, M. H. et al., J. Surg. Res. 52:389 (1992); Greenhalgh, D. G. et al., Am. J. Pathol. 136:1235 (1990)).

[2657] The diabetic animals have many of the characteristic features observed in Type II diabetes mellitus. Homozygous (db+/db+) mice are obese in comparison to their normal heterozygous (db+/+m) littermates. Mutant diabetic (db+/db+) mice have a single autosomal recessive mutation on chromosome 4 (db+) (Coleman et al. Proc. Natl. Acad. Sci. USA 77:283-293 (1982)). Animals show polyphagia, polydipsia and polyuria. Mutant diabetic mice (db+/db+) have elevated blood glucose, increased or normal insulin levels, and suppressed cell-mediated immunity (Mandel et al., J. Immunol. 120:1375 (1978); Debray-Sachs, M. et al., Clin. Exp. Immunol. 51(1):1-7 (1983); Leiter et al., Am. J of Pathol. 114:46-55 (1985)). Peripheral neuropathy, myocardial complications, and microvascular lesions, basement membrane thickening and glomerular filtration abnormalities have been described in these animals (Norido, F. et al., Exp. Neurol. 83(2):221-232 (1984); Robertson et al., Diabetes 29(1):60-67 (1980); Giacomelli et al., Lab Invest. 40(4):460-473 (1979); Coleman, D. L., Diabetes 31 (Suppl):1-6 (1982)). These homozygous diabetic mice develop hyperglycemia that is resistant to insulin analogous to human type II diabetes (Mandel et al., J. Immunol. 120:1375-1377 (1978)).

[2658] The characteristics observed in these animals suggests that healing in this model may be similar to the healing observed in human diabetes (Greenhalgh, et al., Am. J. of Pathol. 136:1235-1246 (1990)).

[2659] Genetically diabetic female C57BL/KsJ (db+/db+) mice and their non-diabetic (db+/+m) heterozygous littermates are used in this study (Jackson Laboratories). The animals are purchased at 6 weeks of age and are 8 weeks old at the beginning of the study. Animals are individually housed and received food and water ad libitum. All manipulations are performed using aseptic techniques. The experiments are conducted according to the rules and guidelines of Human Genome Sciences, Inc. Institutional Animal Care and Use Committee and the Guidelines for the Care and Use of Laboratory Animals.

[2660] Wounding protocol is performed according to previously reported methods (Tsuboi, R. and Rifkin, D. B., J. Exp. Med. 172:245-251 (1990)). Briefly, on the day of wounding, animals are anesthetized with an intraperitoneal injection of Avertin (0.01 mg/mL), 2,2,2-tribromoethanol and 2-methyl-2-butanol dissolved in deionized water. The dorsal region of the animal is shaved and the skin washed with 70% ethanol solution and iodine. The surgical area is dried with sterile gauze prior to wounding. An 8 mm full-thickness wound is then created using a Keyes tissue punch. Immediately following wounding, the surrounding skin is gently stretched to eliminate wound expansion. The wounds are left open for the duration of the experiment. Application of the treatment is given topically for 5 consecutive days commencing on the day of wounding. Prior to treatment, wounds are gently cleansed with sterile saline and gauze sponges.

[2661] Wounds are visually examined and photographed at a fixed distance at the day of surgery and at two day intervals thereafter. Wound closure is determined by daily measurement on days 1-5 and on day 8. Wounds are measured horizontally and vertically using a calibrated Jameson caliper. Wounds are considered healed if granulation tissue is no longer visible and the wound is covered by a continuous epithelium.

[2662] A polypeptide of the invention is administered using at a range different doses, from 4 mg to 500 mg per wound per day for 8 days in vehicle. Vehicle control groups received 50 mL of vehicle solution.

[2663] Animals are euthanized on day 8 with an intraperitoneal injection of sodium pentobarbital (300 mg/kg). The wounds and surrounding skin are then harvested for histology and immunohistochemistry. Tissue specimens are placed in 10% neutral buffered formalin in tissue cassettes between biopsy sponges for further processing.

[2664] Three groups of 10 animals each (5 diabetic and 5 non-diabetic controls) are evaluated: 1) Vehicle placebo control, 2) untreated group, and 3) treated group.

[2665] Wound closure is analyzed by measuring the area in the vertical and horizontal axis and obtaining the total square area of the wound. Contraction is then estimated by establishing the differences between the initial wound area (day 0) and that of post treatment (day 8). The wound area on day 1 is 64 mm², the corresponding size of the dermal punch. Calculations are made using the following formula:

[Open area on day 8]−[Open area on day 1]/[Open area on day 1]

[2666] Specimens are fixed in 10% buffered formalin and paraffin embedded blocks are sectioned perpendicular to the wound surface (5 mm) and cut using a Reichert-Jung microtome. Routine hematoxylin-eosin (H&E) staining is performed on cross-sections of bisected wounds. Histologic examination of the wounds are used to assess whether the healing process and the morphologic appearance of the repaired skin is altered by treatment with a polypeptide of the invention. This assessment included verification of the presence of cell accumulation, inflammatory cells, capillaries, fibroblasts, re-epithelialization and epidermal maturity (Greenhalgh, D. G. et al., Am. J. Pathol. 136:1235 (1990)). A calibrated lens micrometer is used by a blinded observer.

[2667] Tissue sections are also stained immunohistochemically with a polyclonal rabbit anti-human keratin antibody using ABC Elite detection system. Human skin is used as a positive tissue control while non-immune IgG is used as a negative control. Keratinocyte growth is determined by evaluating the extent of reepithelialization of the wound using a calibrated lens micrometer.

[2668] Proliferating cell nuclear antigen/cyclin (PCNA) in skin specimens is demonstrated by using anti-PCNA antibody (1:50) with an ABC Elite detection system. Human colon cancer can serve as a positive tissue control and human brain tissue can be used as a negative tissue control. Each specimen includes a section with omission of the primary antibody and substitution with non-immune mouse IgG. Ranking of these sections is based on the extent of proliferation on a scale of 0-8, the lower side of the scale reflecting slight proliferation to the higher side reflecting intense proliferation.

[2669] Experimental data are analyzed using an unpaired t test. A p value of <0.05 is considered significant.

[2670] Steroid Impaired Rat Model

[2671] The inhibition of wound healing by steroids has been well documented in various in vitro and in vivo systems (Wahl, Glucocorticoids and Wound healing. In: Anti-Inflammatory Steroid Action: Basic and Clinical Aspects. 280-302 (1989); Wahlet al., J. Immunol. 115: 476-481 (1975); Werb et al., J. Exp. Med. 147:1684-1694 (1978)). Glucocorticoids retard wound healing by inhibiting angiogenesis, decreasing vascular permeability (Ebert et al., An. Intern. Med. 37:701-705 (1952)), fibroblast proliferation, and collagen synthesis (Beck et al., Growth Factors. 5: 295-304 (1991); Haynes et al., J. Clin. Invest. 61: 703-797 (1978)) and producing a transient reduction of circulating monocytes (Haynes et al., J. Clin. Invest. 61: 703-797 (1978); Wahl, “Glucocorticoids and wound healing”, In: Antiinflammatory Steroid Action: Basic and Clinical Aspects, Academic Press, New York, pp. 280-302 (1989)). The systemic administration of steroids to impaired wound healing is a well establish phenomenon in rats (Beck et al., Growth Factors. 5: 295-304 (1991); Haynes et al., J. Clin. Invest. 61: 703-797 (1978); Wahl, “Glucocorticoids and wound healing”, In: Antiinflammatory Steroid Action: Basic and Clinical Aspects, Academic Press, New York, pp. 280-302 (1989); Pierce et al., Proc. Natl. Acad. Sci. USA 86: 2229-2233 (1989)).

[2672] To demonstrate that a polypeptide of the invention can accelerate the healing process, the effects of multiple topical applications of the polypeptide on full thickness excisional skin wounds in rats in which healing has been impaired by the systemic administration of methylprednisolone is assessed.

[2673] Young adult male Sprague Dawley rats weighing 250-300 g (Charles River Laboratories) are used in this example. The animals are purchased at 8 weeks of age and are 9 weeks old at the beginning of the study. The healing response of rats is impaired by the systemic administration of methylprednisolone (17 mg/kg/rat intramuscularly) at the time of wounding. Animals are individually housed and received food and water ad libitum. All manipulations are performed using aseptic techniques. This study is conducted according to the rules and guidelines of Human Genome Sciences, Inc. Institutional Animal Care and Use Committee and the Guidelines for the Care and Use of Laboratory Animals.

[2674] The wounding protocol is followed according to section A, above. On the day of wounding, animals are anesthetized with an intramuscular injection of ketamine (50 mg/kg) and xylazine (5 mg/kg). The dorsal region of the animal is shaved and the skin washed with 70% ethanol and iodine solutions. The surgical area is dried with sterile gauze prior to wounding. An 8 mm full-thickness wound is created using a Keyes tissue punch. The wounds are left open for the duration of the experiment. Applications of the testing materials are given topically once a day for 7 consecutive days commencing on the day of wounding and subsequent to methylprednisolone administration. Prior to treatment, wounds are gently cleansed with sterile saline and gauze sponges.

[2675] Wounds are visually examined and photographed at a fixed distance at the day of wounding and at the end of treatment. Wound closure is determined by daily measurement on days 1-5 and on day 8. Wounds are measured horizontally and vertically using a calibrated Jameson caliper. Wounds are considered healed if granulation tissue is no longer visible and the wound is covered by a continuous epithelium.

[2676] The polypeptide of the invention is administered using at a range different doses, from 4 mg to 500 mg per wound per day for 8 days in vehicle. Vehicle control groups received 50 mL of vehicle solution.

[2677] Animals are euthanized on day 8 with an intraperitoneal injection of sodium pentobarbital (300 mg/kg). The wounds and surrounding skin are then harvested for histology. Tissue specimens are placed in 10% neutral buffered formalin in tissue cassettes between biopsy sponges for further processing.

[2678] Four groups of 10 animals each (5 with methylprednisolone and 5 without glucocorticoid) are evaluated: 1) Untreated group 2) Vehicle placebo control 3) treated groups.

[2679] Wound closure is analyzed by measuring the area in the vertical and horizontal axis and obtaining the total area of the wound. Closure is then estimated by establishing the differences between the initial wound area (day 0) and that of post treatment (day 8). The wound area on day 1 is 64 mm², the corresponding size of the dermal punch. Calculations are made using the following formula:

[Open area on day 8]−[Open area on day 1]/[Open area on day 1]

[2680] Specimens are fixed in 10% buffered formalin and paraffin embedded blocks are sectioned perpendicular to the wound surface (5 mm) and cut using an Olympus microtome. Routine hematoxylin-eosin (H&E) staining is performed on cross-sections of bisected wounds. Histologic examination of the wounds allows assessment of whether the healing process and the morphologic appearance of the repaired skin is improved by treatment with a polypeptide of the invention. A calibrated lens micrometer is used by a blinded observer to determine the distance of the wound gap.

[2681] Experimental data are analyzed using an unpaired t test. A p value of <0.05 is considered significant.

[2682] The studies described in this example tested activity of a polypeptide of the invention. However, one skilled in the art could easily modify the exemplified studies to test the activity of polynucleotides (e.g., gene therapy), agonists, and/or antagonists of the invention.

### Example 51

### Lymphadema Animal Model

[2683] The purpose of this experimental approach is to create an appropriate and consistent lymphedema model for testing the therapeutic effects of a polypeptide of the invention in lymphangiogenesis and re-establishment of the lymphatic circulatory system in the rat hind limb. Effectiveness is measured by swelling volume of the affected limb, quantification of the amount of lymphatic vasculature, total blood plasma protein, and histopathology. Acute lymphedema is observed for 7-10 days. Perhaps more importantly, the chronic progress of the edema is followed for up to 3-4 weeks.

[2684] Prior to beginning surgery, blood sample is drawn for protein concentration analysis. Male rats weighing approximately 350 g are dosed with Pentobarbital. Subsequently, the right legs are shaved from knee to hip. The shaved area is swabbed with gauze soaked in 70% EtOH. Blood is drawn for serum total protein testing. Circumference and volumetric measurements are made prior to injecting dye into paws after marking 2 measurement levels (0.5 cm above heel, at mid-pt of dorsal paw). The intradermal dorsum of both right and left paws are injected with 0.05 ml of 1% Evan's Blue. Circumference and volumetric measurements are then made following injection of dye into paws.

[2685] Using the knee joint as a landmark, a mid-leg inguinal incision is made circumferentially allowing the femoral vessels to be located. Forceps and hemostats are used to dissect and separate the skin flaps. After locating the femoral vessels, the lymphatic vessel that runs along side and underneath the vessel(s) is located. The main lymphatic vessels in this area are then electrically coagulated suture ligated.

[2686] Using a microscope, muscles in back of the leg (near the semitendinosis and adductors) are bluntly dissected. The popliteal lymph node is then located. The 2 proximal and 2 distal lymphatic vessels and distal blood supply of the popliteal node are then and ligated by suturing. The popliteal lymph node, and any accompanying adipose tissue, is then removed by cutting connective tissues.

[2687] Care is taken to control any mild bleeding resulting from this procedure. After lymphatics are occluded, the skin flaps are sealed by using liquid skin (Vetbond) (AJ Buck). The separated skin edges are sealed to the underlying muscle tissue while leaving a gap of 0.5 cm around the leg. Skin also may be anchored by suturing to underlying muscle when necessary.

[2688] To avoid infection, animals are housed individually with mesh (no bedding). Recovering animals are checked daily through the optimal edematous peak, which typically occurred by day 5-7. The plateau edematous peak are then observed. To evaluate the intensity of the lymphedema, the circumference and volumes of 2 designated places on each paw before operation and daily for 7 days are measured. The effect plasma proteins on lymphedema is determined and whether protein analysis is a useful testing perimeter is also investigated. The weights of both control and edematous limbs are evaluated at 2 places. Analysis is performed in a blind manner.

[2689] Circumference Measurements: Under brief gas anesthetic to prevent limb movement, a cloth tape is used to measure limb circumference. Measurements are done at the ankle bone and dorsal paw by 2 different people then those 2 readings are averaged. Readings are taken from both control and edematous limbs.

[2690] Volumetric Measurements: On the day of surgery, animals are anesthetized with Pentobarbital and are tested prior to surgery. For daily volumetrics animals are under brief halothane anesthetic (rapid immobilization and quick recovery), both legs are shaved and equally marked using waterproof marker on legs. Legs are first dipped in water, then dipped into instrument to each marked level then measured by Buxco edema software (Chen/Victor). Data is recorded by one person, while the other is dipping the limb to marked area.

[2691] Blood-plasma protein measurements: Blood is drawn, spun, and serum separated prior to surgery and then at conclusion for total protein and Ca2+ comparison.

[2692] Limb Weight Comparison: After drawing blood, the animal is prepared for tissue collection. The limbs are amputated using a quillitine, then both experimental and control legs are cut at the ligature and weighed. A second weighing is done as the tibio-cacaneal joint is disarticulated and the foot is weighed.

[2693] Histological Preparations: The transverse muscle located behind the knee (popliteal) area is dissected and arranged in a metal mold, filled with freezeGel, dipped into cold methylbutane, placed into labeled sample bags at −80EC until sectioning. Upon sectioning, the muscle is observed under fluorescent microscopy for lymphatics.

[2694] The studies described in this example tested activity of a polypeptide of the invention. However, one skilled in the art could easily modify the exemplified studies to test the activity of polynucleotides (e.g., gene therapy), agonists, and/or antagonists of the invention.

### Example 52

### Suppression of TNF Alpha-Induced Adhesion Molecule Expression by a Polypeptide of the Invention

[2695] The recruitment of lymphocytes to areas of inflammation and angiogenesis involves specific receptor-ligand interactions between cell surface adhesion molecules (CAMs) on lymphocytes and the vascular endothelium. The adhesion process, in both normal and pathological settings, follows a multi-step cascade that involves intercellular adhesion molecule-1 (ICAM-1), vascular cell adhesion molecule-1 (VCAM-1), and endothelial leukocyte adhesion molecule-1 (E-selectin) expression on endothelial cells (EC). The expression of these molecules and others on the vascular endothelium determines the efficiency with which leukocytes may adhere to the local vasculature and extravasate into the local tissue during the development of an inflammatory response. The local concentration of cytokines and growth factor participate in the modulation of the expression of these CAMs.

[2696] Tumor necrosis factor alpha (TNF-a), a potent proinflammatory cytokine, is a stimulator of all three CAMs on endothelial cells and may be involved in a wide variety of inflammatory responses, often resulting in a pathological outcome.

[2697] The potential of a polypeptide of the invention to mediate a suppression of TNF-a induced CAM expression can be examined. A modified ELISA assay which uses ECs as a solid phase absorbent is employed to measure the amount of CAM expression on TNF-a treated ECs when co-stimulated with a member of the FGF family of proteins.

[2698] To perform the experiment, human umbilical vein endothelial cell (HUVEC) cultures are obtained from pooled cord harvests and maintained in growth medium (EGM-2; Clonetics, San Diego, Calif.) supplemented with 10% FCS and 1% penicillin/streptomycin in a 37 degree C. humidified incubator containing 5% CO₂. HUVECs are seeded in 96-well plates at concentrations of 1×10⁴ cells/well in EGM medium at 37 degree C. for 18-24 hrs or until confluent. The monolayers are subsequently washed 3 times with a serum-free solution of RPMI-1640 supplemented with 100 U/ml penicillin and 100 mg/ml streptomycin, and treated with a given cytokine and/or growth factor(s) for 24 h at 37 degree C. Following incubation, the cells are then evaluated for CAM expression.

[2699] Human Umbilical Vein Endothelial cells (HUVECs) are grown in a standard 96 well plate to confluence. Growth medium is removed from the cells and replaced with 90 ul of 199 Medium (10% FBS). Samples for testing and positive or negative controls are added to the plate in triplicate (in 10 ul volumes). Plates are incubated at 37 degree C. for either 5 h (selectin and integrin expression) or 24 h (integrin expression only). Plates are aspirated to remove medium and 100 μl of 0.1% paraformaldehyde-PBS(with Ca++ and Mg++) is added to each well. Plates are held at 4° C. for 30 min.

[2700] Fixative is then removed from the wells and wells are washed 1× with PBS(+Ca,Mg)+0.5% BSA and drained. Do not allow the wells to dry. Add 10 μl of diluted primary antibody to the test and control wells. Anti-ICAM-1-Biotin, Anti-VCAM-1-Biotin and Anti-E-selectin-Biotin are used at a concentration of 10 μg/ml (1:10 dilution of 0.1 mg/ml stock antibody). Cells are incubated at 37° C. for 30 min. in a humidified environment. Wells are washed ×3 with PBS(+Ca,Mg)+0.5% BSA.

[2701] Then add 20 μl of diluted ExtrAvidin-Alkaline Phosphotase (1:5,000 dilution) to each well and incubated at 37° C. for 30 min. Wells are washed ×3 with PBS(+Ca,Mg)+0.5% BSA. 1 tablet of p-Nitrophenol Phosphate pNPP is dissolved in 5 ml of glycine buffer (pH 10.4). 100 μl of pNPP substrate in glycine buffer is added to each test well. Standard wells in triplicate are prepared from the working dilution of the ExtrAvidin-Alkaline Phosphotase in glycine buffer: 1:5,000 (10⁰)>10^{-0.5}>10⁻¹>10^{-1.5}. 5 μl of each dilution is added to triplicate wells and the resulting AP content in each well is 5.50 ng, 1.74 ng, 0.55 ng, 0.18 ng. 100 μl of pNNP reagent must then be added to each of the standard wells. The plate must be incubated at 37° C. for 4 h. A volume of 50 μl of 3M NaOH is added to all wells. The results are quantified on a plate reader at 405 nm. The background subtraction option is used on blank wells filled with glycine buffer only. The template is set up to indicate the concentration of AP-conjugate in each standard well [5.50 ng; 1.74 ng; 0.55 ng; 0.18 ng]. Results are indicated as amount of bound AP-conjugate in each sample.

[2702] The studies described in this example tested activity of a polypeptide of the invention. However, one skilled in the art could easily modify the exemplified studies to test the activity of polynucleotides (e.g., gene therapy), agonists, and/or antagonists of the invention.

### Example 53

### Assay for the Stimulation of Bone Marrow CD34+ Cell Proliferation

[2703] This assay is based on the ability of human CD34+ to proliferate in the presence of hematopoietic growth factors and evaluates the ability of isolated polypeptides expressed in mammalian cells to stimulate proliferation of CD34+ cells.

[2704] It has been previously shown that most mature precursors will respond to only a single signal. More immature precursors require at least two signals to respond. Therefore, to test the effect of polypeptides on hematopoietic activity of a wide range of progenitor cells, the assay contains a given polypeptide in the presence or absence of other hematopoietic growth factors. Isolated cells are cultured for 5 days in the presence of Stem Cell Factor (SCF) in combination with tested sample. SCF alone has a very limited effect on the proliferation of bone marrow (BM) cells, acting in such conditions only as a “survival” factor. However, combined with any factor exhibiting stimulatory effect on these cells (e.g., IL-3), SCF will cause a synergistic effect. Therefore, if the tested polypeptide has a stimulatory effect on a hematopoietic progenitors, such activity can be easily detected. Since normal BM cells have a low level of cycling cells, it is likely that any inhibitory effect of a given polypeptide, or agonists or antagonists thereof, might not be detected. Accordingly, assays for an inhibitory effect on progenitors is preferably tested in cells that are first subjected to in vitro stimulation with SCF+IL+3, and then contacted with the compound that is being evaluated for inhibition of such induced proliferation.

[2705] Briefly, CD34+ cells are isolated using methods known in the art. The cells are thawed and resuspended in medium (QBSF 60 serum-free medium with 1% L-glutamine (500 ml) Quality Biological, Inc., Gaithersburg, Md. Cat# 160-204-101). After several gentle centrifugation steps at 200×g, cells are allowed to rest for one hour. The cell count is adjusted to 2.5×10⁵ cells/ml. During this time, 100 μl of sterile water is added to the peripheral wells of a 96-well plate. The cytokines that can be tested with a given polypeptide in this assay is rhSCF (R&D Systems, Minneapolis, Minn., Cat# 255-SC) at 50 ng/ml alone and in combination with rhSCF and rhIL-3 (R&D Systems, Minneapolis, Minn., Cat# 203-ML) at 30 ng/ml. After one hour, 10 μl of prepared cytokines, 50 μl SID (supernatants at 1:2 dilution=50 μl) and 20 μl of diluted cells are added to the media which is already present in the wells to allow for a final total volume of 100 μl. The plates are then placed in a 37° C./5% CO₂ incubator for five days.

[2706] Eighteen hours before the assay is harvested, 0.5 μCi/well of [3H] Thymidine is added in a 10 μl volume to each well to determine the proliferation rate. The experiment is terminated by harvesting the cells from each 96-well plate to a filtermat using the Tomtec Harvester 96. After harvesting, the filtennats are dried, trimmed and placed into OmniFilter assemblies consisting of one OmniFilter plate and one OmniFilter Tray. 60 μl Microscint is added to each well and the plate sealed with TopSeal-A press-on sealing film A bar code 15 sticker is affixed to the first plate for counting. The sealed plates is then loaded and the level of radioactivity determined via the Packard Top Count and the printed data collected for analysis. The level of radioactivity reflects the amount of cell proliferation.

[2707] The studies described in this example test the activity of a given polypeptide to stimulate bone marrow CD34+ cell proliferation. One skilled in the art could easily modify the exemplified studies to test the activity of polynucleotides (e.g., gene therapy), antibodies, agonists, and/or antagonists and fragments and variants thereof. As a nonlimiting example, potential antagonists tested in this assay would be expected to inhibit cell proliferation in the presence of cytokines and/or to increase the inhibition of cell proliferation in the presence of cytokines and a given polypeptide. In contrast, potential agonists tested in this assay would be expected to enhance cell proliferation and/or to decrease the inhibition of cell proliferation in the presence of cytokines and a given polypeptide.

[2708] The ability of a gene to stimulate the proliferation of bone marrow CD34+ cells indicates that polynucleotides and polypeptides corresponding to the gene are useful for the diagnosis and treatment of disorders affecting the immune system and hematopoiesis. Representative uses are described in the “Immune Activity” and “Infectious Disease” sections above, and elsewhere herein.

### Example 54

### Assay for Extracellular Matrix Enhanced Cell Response (EMECR)

[2709] The objective of the Extracellular Matrix Enhanced Cell Response (EMECR) assay is to identify gene products (e.g., isolated polypeptides) that act on the hematopoietic stem cells in the context of the extracellular matrix (ECM) induced signal.

[2710] Cells respond to the regulatory factors in the context of signal(s) received from the surrounding microenvironment. For example, fibroblasts, and endothelial and epithelial stem cells fail to replicate in the absence of signals from the ECM. Hematopoietic stem cells can undergo self-renewal in the bone marrow, but not in in vitro suspension culture. The ability of stem cells to undergo self-renewal in vitro is dependent upon their interaction with the stromal cells and the ECM protein fibronectin (fn). Adhesion of cells to fn is mediated by the α₅.β₁ and α₄.β₁ integrin receptors, which are expressed by human and mouse hematopoietic stem cells. The factor(s) which integrate with the ECM environment and responsible for stimulating stem cell self-renewal has not yet been identified. Discovery of such factors should be of great interest in gene therapy and bone marrow transplant applications

[2711] Briefly, polystyrene, non tissue culture treated, 96-well plates are coated with fn fragment at a coating concentration of 0.2 μg/cm². Mouse bone marrow cells are plated (1,000 cells/well) in 0.2 ml of serum-free medium. Cells cultured in the presence of IL-3 (5 ng/ml)+SCF (50 ng/ml) would serve as the positive control, conditions under which little self-renewal but pronounced differentiation of the stem cells is to be expected. Gene products are tested with appropriate negative controls in the presence and absence of SCF (5.0 ng/ml), where test factor supernates represent 10% of the total assay volume. The plated cells are then allowed to grow by incubating in a low oxygen environment (5% CO₂, 7% O₂, and 88% N₂) tissue culture incubator for 7 days. The number of proliferating cells within the wells is then quantitated by measuring thymidine incorporation into cellular DNA. Verification of the positive hits in the assay will require phenotypic characterization of the cells, which can be accomplished by scaling up of the culture system and using appropriate antibody reagents against cell surface antigens and FACScan.

[2712] One skilled in the art could easily modify the exemplified studies to test the activity of polynucleotides (e.g., gene therapy), antibodies, agonists, and/or antagonists and fragments and variants thereof.

[2713] If a particular gene product is found to be a stimulator of hematopoietic progenitors, polynucleotides and polypeptides corresponding to the gene may be useful for the diagnosis and treatment of disorders affecting the immune system and hematopoiesis. Representative uses are described in the “Immune Activity” and “Infectious Disease” sections above, and elsewhere herein. The gene product may also be useful in the expansion of stem cells and committed progenitors of various blood lineages, and in the differentiation and/or proliferation of various cell types.

[2714] Additionally, the polynucleotides and/or polypeptides of the gene of interest and/or agonists and/or antagonists thereof, may also be employed to inhibit the proliferation and differentiation of hematopoietic cells and therefore may be employed to protect bone marrow stem cells from chemotherapeutic agents during chemotherapy. This antiproliferative effect may allow administration of higher doses of chemotherapeutic agents and, therefore, more effective chemotherapeutic treatment.

[2715] Moreover, polynucleotides and polypeptides corresponding to the gene of interest may also be useful for the treatment and diagnosis of hematopoietic related disorders such as, for example, anemia, pancytopenia, leukopenia, thrombocytopenia or leukemia since stromal cells are important in the production of cells of hematopoietic lineages. The uses include bone marrow cell ex-vivo culture, bone marrow transplantation, bone marrow reconstitution, radiotherapy or chemotherapy of neoplasia.

### Example 55

### Human Dermal Fibroblast and Aortic Smooth Muscle Cell Proliferation

[2716] The polypeptide of interest is added to cultures of normal human dermal fibroblasts (NHDF) and human aortic smooth muscle cells (AoSMC) and two co-assays are performed with each sample. The first assay examines the effect of the polypeptide of interest on the proliferation of normal human dermal fibroblasts (NHDF) or aortic smooth muscle cells (AoSMC). Aberrant growth of fibroblasts or smooth muscle cells is a part of several pathological processes, including fibrosis, and restenosis. The second assay examines IL6 production by both NHDF and SMC. IL6 production is an indication of functional activation. Activated cells will have increased production of a number of cytokines and other factors, which can result in a proinflammatory or immunomodulatory outcome. Assays are run with and without co-TNFa stimulation, in order to check for costimulatory or inhibitory activity.

[2717] Briefly, on day 1, 96-well black plates are set up with 1000 cells/well (NHDF) or 2000 cells/well (AOSMC) in 100 μl culture media. NHDF culture media contains: Clonetics FB basal media, 1 mg/ml hFGF, 5 mg/ml insulin, 50 mg/ml gentamycin, 2%FBS, while AoSMC culture media contains Clonetics SM basal media, 0.5 μg/ml hEGF, 5 mg/ml insulin, 1 μg/ml hFGF, 50 mg/ml gentamycin, 50 μg/ml Amphotericin B, 5%FBS. After incubation @ 37° C. for at least 4-5 hours culture media is aspirated and replaced with growth arrest media. Growth arrest media for NHDF contains fibroblast basal media, 50 mg/ml gentamycin, 2% FBS, while growth arrest media for AoSMC contains SM basal media, 50 mg/ml gentamycin, 50 μg/ml Amphotericin B, 0.4% FBS. Incubate at 37C until day 2.

[2718] On day 2, serial dilutions and templates of the polypeptide of interest are designed which should always include media controls and known-protein controls. For both stimulation and inhibition experiments, proteins are diluted in growth arrest media. For inhibition experiments, TNFa is added to a final concentration of 2 ng/ml (NHDF) or 5 ng/ml (AoSMC). Then add ⅓ vol media containing controls or supernatants and incubate at 37C/5% CO₂ until day 5.

[2719] Transfer 60 μl from each well to another labeled 96-well plate, cover with a plate-sealer, and store at 4C until Day 6 (for IL6 ELISA). To the remaining 100 μl in the cell culture plate, aseptically add Alamar Blue in an amount equal to 10% of the culture volume (10). Return plates to incubator for 3 to 4 hours. Then measure fluorescence with excitation at 530 nm and emission at 590 nm using the Cyto Fluor. This yields the growth stimulation/inhibition data.

[2720] On day 5, the IL6 ELISA is performed by coating a 96 well plate with 50-100 ul/well of Anti-Human IL6 Monoclonal antibody diluted in PBS, pH 7.4, incubate ON at room temperature.

[2721] On day 6, empty the plates into the sink and blot on paper towels. Prepare Assay Buffer containing PBS with 4% BSA. Block the plates with 200 μl/well of Pierce Super Block blocking buffer in PBS for 1-2 hr and then wash plates with wash buffer (PBS, 0.05% Tween-20). Blot plates on paper towels. Then add 50 μl/well of diluted Anti-Human IL-6 Monoclonal, Biotin-labeled antibody at 0.50 mg/ml. Make dilutions of IL-6 stock in media (30, 10, 3, 1, 0.3, 0 ng/ml). Add duplicate samples to top row of plate. Cover the plates and incubate for 2 hours at RT on shaker.

[2722] Wash plates with wash buffer and blot on paper towels. Dilute EU-labeled Streptavidin 1:1000 in Assay buffer, and add 100 μl/well. Cover the plate and incubate 1 h at RT. Wash plates with wash buffer. Blot on paper towels.

[2723] Add 100 μl/well of Enhancement Solution. Shake for 5 minutes. Read the plate on the Wallac DELFIA Fluorometer. Readings from triplicate samples in each assay were tabulated and averaged.

[2724] A positive result in this assay suggests AoSMC cell proliferation and that the gene product of interest may be involved in dermal fibroblast proliferation and/or smooth muscle cell proliferation. A positive result also suggests many potential uses of polypeptides, polynucleotides, agonists and/or antagonists of the gene/gene product of interest. For example, inflammation and immune responses, wound healing, and angiogenesis, as detailed throughout this specification. Particularly, polypeptides of the gene product and polynucleotides of the gene may be used in wound healing and dermal regeneration, as well as the promotion of vasculargenesis, both of the blood vessels and lymphatics. The growth of vessels can be used in the treatment of, for example, cardiovascular diseases. Additionally, antagonists of polypeptides of the gene product and polynucleotides of the gene may be useful in treating diseases, disorders, and/or conditions which involve angiogenesis by acting as an anti-vascular (e.g., anti-angiogenesis). These diseases, disorders, and/or conditions are known in the art and/or are described herein, such as, for example, malignancies, solid tumors, benign tumors, for example hemangiomas, acoustic neuromas, neurofibromas, trachomas, and pyogenic granulomas; artheroscleric plaques; ocular angiogenic diseases, for example, diabetic retinopathy, retinopathy of prematurity, macular degeneration, corneal graft rejection, neovascular glaucoma, retrolental fibroplasia, rubeosis, retinoblastoma, uvietis and Pterygia (abnormal blood vessel growth) of the eye; rheumatoid arthritis; psoriasis; delayed wound healing; endometriosis; vasculogenesis; granulations; hypertrophic scars (keloids); nonunion fractures; scleroderma; trachoma; vascular adhesions; myocardial angiogenesis; coronary collaterals; cerebral collaterals; arterioyenous malformations; ischemic limb angiogenesis; Osler-Webber Syndrome; plaque neovascularization; telangiectasia; hemophiliac joints; angiofibroma; fibromuscular dysplasia; wound granulation; Crohn's disease; and atherosclerosis. Moreover, antagonists of polypeptides of the gene product and polynucleotides of the gene may be useful in treating anti-hyperproliferative diseases and/or anti-inflammatory known in the art and/or described herein.

[2725] One skilled in the art could easily modify the exemplified studies to test the activity of polynucleotides (e.g., gene therapy), antibodies, agonists, and/or antagonists and fragments and variants thereof.

### Example 56

### Cellular Adhesion Molecule (CAM) Expression on Endothelial Cells

[2726] The recruitment of lymphocytes to areas of inflammation and angiogenesis involves specific receptor-ligand interactions between cell surface adhesion molecules (CAMs) on lymphocytes and the vascular endothelium. The adhesion process, in both normal and pathological settings, follows a multi-step cascade that involves intercellular adhesion molecule-1 (ICAM-1), vascular cell adhesion molecule-1 (VCAM-1), and endothelial leukocyte adhesion molecule-1 (E-selectin) expression on endothelial cells (EC). The expression of these molecules and others on the vascular endothelium determines the efficiency with which leukocytes may adhere to the local vasculature and extravasate into the local tissue during the development of an inflammatory response. The local concentration of cytokines and growth factor participate in the modulation of the expression of these CAMs.

[2727] Briefly, endothelial cells (e.g., Human Umbilical Vein Endothelial cells (HUVECs)) are grown in a standard 96 well plate to confluence, growth medium is removed from the cells and replaced with 100 μl of 199 Medium (10% fetal bovine serum (FBS)). Samples for testing and positive or negative controls are added to the plate in triplicate (in 10 μl volumes). Plates are then incubated at 37° C. for either 5 h (selectin and integrin expression) or 24 h (integrin expression only). Plates are aspirated to remove medium and 100 μl of 0.1% paraformaldehyde-PBS(with Ca++ and Mg++) is added to each well. Plates are held at 4° C. for 30 min. Fixative is removed from the wells and wells are washed 1× with PBS(+Ca,Mg)+0.5% BSA and drained. 10 μl of diluted primary antibody is added to the test and control wells. Anti-ICAM-1-Biotin, Anti-VCAM-1-Biotin and Anti-E-selectin-Biotin are used at a concentration of 10 μg/ml (1:10 dilution of 0.1 mg/ml stock antibody). Cells are incubated at 37° C. for 30 min. in a humidified environment. Wells are washed three times with PBS(+Ca,Mg)+0.5% BSA. 20 μl of diluted ExtrAvidin-Alkaline Phosphotase (1:5,000 dilution, refered to herein as the working dilution) are added to each well and incubated at 37° C. for 30 min. Wells are washed three times with PBS(+Ca,Mg)+0.5% BSA. Dissolve 1 tablet of p-Nitrophenol Phosphate pNPP per 5 ml of glycine buffer (pH 10.4). 100 μl of pNPP substrate in glycine buffer is added to each test well. Standard wells in triplicate are prepared from the working dilution of the ExtrAvidin-Alkaline Phosphotase in glycine buffer: 1:5,000 (10⁰)>10^{-0.5}>10⁻¹>10^{-1.5}. 5 μl of each dilution is added to triplicate wells and the resulting AP content in each well is 5.50 ng, 1.74 ng, 0.55 ng, 0.18 ng. 100 μl of pNNP reagent is then added to each of the standard wells. The plate is incubated at 37° C. for 4 h. A volume of 50 μl of 3M NaOH is added to all wells. The plate is read on a plate reader at 405 nm using the background subtraction option on blank wells filled with glycine buffer only. Additionally, the template is set up to indicate the concentration of AP-conjugate in each standard well [5.50 ng; 1.74 ng; 0.55 ng; 0.18 ng]. Results are indicated as amount of bound AP-conjugate in each sample.

### Example 57

### Alamar Blue Endothelial Cells Proliferation Assay

[2728] This assay may be used to quantitatively determine protein mediated inhibition of bFGF-induced proliferation of Bovine Lymphatic Endothelial Cells (LECs), Bovine Aortic Endothelial Cells (BAECs) or Human Microvascular Uterine Myometrial Cells (UTMECs). This assay incorporates a fluorometric growth indicator based on detection of metabolic activity. A standard Alamar Blue Proliferation Assay is prepared in EGM-2MV with 10 ng/ml of bFGF added as a source of endothelial cell stimulation. This assay may be used with a variety of endothelial cells with slight changes in growth medium and cell concentration. Dilutions of the protein batches to be tested are diluted as appropriate. Serum-free medium (GIBCO SFM) without bFGF is used as a non-stimulated control and Angiostatin or TSP-1 are included as a known inhibitory controls.

[2729] Briefly, LEC, BAECs or UTMECs are seeded in growth media at a density of 5000 to 2000 cells/well in a 96 well plate and placed at 37-C overnight. After the overnight incubation of the cells, the growth media is removed and replaced with GIBCO EC-SFM. The cells are treated with the appropriate dilutions of the protein of interest or control protein sample(s) (prepared in SFM) in triplicate wells with additional bFGF to a concentration of 10 ng/ml. Once the cells have been treated with the samples, the plate(s) is/are placed back in the 37° C. incubator for three days. After three days 10 ml of stock alamar blue (Biosource Cat# DAL1100) is added to each well and the plate(s) is/are placed back in the 37° C. incubator for four hours. The plate(s) are then read at 530 nm excitation and 590 nm emission using the Cyto Fluor fluorescence reader. Direct output is recorded in relative fluorescence units.

[2730] Alamar blue is an oxidation-reduction indicator that both fluoresces and changes color in response to chemical reduction of growth medium resulting from cell growth. As cells grow in culture, innate metabolic activity results in a chemical reduction of the immediate surrounding environment. Reduction related to growth causes the indicator to change from oxidized (non-fluorescent blue) form to reduced (fluorescent red) form. i.e. stimulated proliferation will produce a stronger signal and inhibited proliferation will produce a weaker signal and the total signal is proportional to the total number of cells as well as their metabolic activity. The background level of activity is observed with the starvation medium alone. This is compared to the output observed from the positive control samples (bFGF in growth medium) and protein dilutions.

### Example 58

### Detection of Inhibition of a Mixed Lymphocyte Reaction

[2731] This assay can be used to detect and evaluate inhibition of a Mixed Lymphocyte Reaction (MLR) by gene products (e.g., isolated polypeptides). Inhibition of a MLR may be due to a direct effect on cell proliferation and viability, modulation of costimulatory molecules on interacting cells, modulation of adhesiveness between lymphocytes and accessory cells, or modulation of cytokine production by accessory cells. Multiple cells may be targeted by these polypeptides since the peripheral blood mononuclear fraction used in this assay includes T, B and natural killer lymphocytes, as well as monocytes and dendritic cells.

[2732] Polypeptides of interest found to inhibit the MLR may find application in diseases associated with lymphocyte and monocyte activation or proliferation. These include, but are not limited to, diseases such as asthma, arthritis, diabetes, inflammatory skin conditions, psoriasis, eczema, systemic lupus erythematosus, multiple sclerosis, glomerulonephritis, inflammatory bowel disease, crohn's disease, ulcerative colitis, arteriosclerosis, cirrhosis, graft vs. host disease, host vs. graft disease, hepatitis, leukemia and lymphoma.

[2733] Briefly, PBMCs from human donors are purified by density gradient centrifugation using Lymphocyte Separation Medium (LSM®, density 1.0770 g/ml, Organon Teknika Corporation, West Chester, Pa.). PBMCs from two donors are adjusted to 2×10⁶ cells/ml in RPMI-1640 (Life Technologies, Grand Island, N.Y.) supplemented with 10% FCS and 2 mM glutamine. PBMCs from a third donor is adjusted to 2×10⁵ cells/ml. Fifty microliters of PBMCs from each donor is added to wells of a 96-well round bottom microtiter plate. Dilutions of test materials (50 μl) is added in triplicate to microtiter wells. Test samples (of the protein of interest) are added for final dilution of 1:4; rhuIL-2 (R&D Systems, Minneapolis, Minn., catalog number 202-IL) is added to a final concentration of 1 μg/ml; anti-CD4 mAb (R&D Systems, clone 34930.11, catalog number MAB379) is added to a final concentration of 10 μg/ml. Cells are cultured for 7-8 days at 37° C. in 5% CO₂, and 1 μC of [³H] thymidine is added to wells for the last 16 hrs of culture. Cells are harvested and thymidine incorporation determined using a Packard TopCount. Data is expressed as the mean and standard deviation of triplicate determinations.

[2734] Samples of the protein of interest are screened in separate experiments and compared to the negative control treatment, anti-CD4 mAb, which inhibits proliferation of lymphocytes and the positive control treatment, IL-2 (either as recombinant material or supernatant), which enhances proliferation of lymphocytes.

[2735] One skilled in the art could easily modify the exemplified studies to test the activity of polynucleotides (e.g., gene therapy), antibodies, agonists, and/or antagonists and fragments and variants thereof.

[2736] It will be clear that the invention may be practiced otherwise than as particularly described in the foregoing description and examples. Numerous modifications and variations of the present invention are possible in light of the above teachings and, therefore, are within the scope of the appended claims.

[2737] The entire disclosure of each document cited (including patents, patent applications, journal articles, abstracts, laboratory manuals, books, or other disclosures) in the Background of the Invention, Detailed Description, and Examples is hereby incorporated herein by reference. Further, the hard copy of the sequence listing submitted herewith and the corresponding computer readable form are both incorporated herein by reference in their entireties. Additionally, the specifications and sequence listings of International Application No. PCT/US01/05614 filed Feb. 21, 2001, and of U.S. Provisional Applications Serial Nos. 60/184,836 and 60/193,170 are all hereby incorporated by reference in their entirety.

TABLE 3
(Gene No: 30/Clone ID: HTPBW79)

| Res | Position | I | II | III | IV | V | VI | VII | VIII | IX | X | XI | XII | XIII | XIV |
|---|---|---|---|---|---|---|---|---|---|---|---|---|---|---|---|
| Met | 1 | . | . | B | B | . | . | . | −0.37 | 0.07 | * | * | . | −0.30 | 0.86 |
| Arg | 2 | . | . | B | B | . | . | . | 0.02 | 0.43 | * | * | . | −0.60 | 0.59 |
| Thr | 3 | . | . | B | B | . | . | . | −0.40 | 0.40 | * | * | . | −0.30 | 0.74 |
| Leu | 4 | A | A | . | . | . | . | . | −0.82 | 0.66 | * | * | . | −0.60 | 0.61 |
| Phe | 5 | A | A | . | . | . | . | . | −0.72 | 0.73 | * | * | . | −0.60 | 0.26 |
| Asn | 6 | A | A | . | . | . | . | . | −0.93 | 1.64 | * | * | . | −0.60 | 0.19 |
| Leu | 7 | A | A | . | . | . | . | . | −1.63 | 1.84 | * | * | . | −0.60 | 0.19 |
| Leu | 8 | A | A | . | . | . | . | . | −2.13 | 1.66 | . | . | . | −0.60 | 0.22 |
| Trp | 9 | A | A | . | . | . | . | . | −1.91 | 1.56 | . | . | . | −0.60 | 0.11 |
| Leu | 10 | A | A | . | . | . | . | . | −1.88 | 1.66 | . | . | . | −0.60 | 0.14 |
| Ala | 11 | A | A | . | . | . | . | . | −2.18 | 1.54 | . | . | . | −0.60 | 0.09 |
| Leu | 12 | A | A | . | . | . | . | . | −1.58 | 1.24 | . | . | . | −0.60 | 0.11 |
| Ala | 13 | A | A | . | . | . | . | . | −1.62 | 0.76 | . | . | . | −0.60 | 0.21 |
| Cys | 14 | . | A | B | . | . | . | . | −1.37 | 0.71 | . | . | . | −0.60 | 0.16 |
| Ser | 15 | . | A | B | . | . | . | . | −0.87 | 0.71 | . | . | . | −0.60 | 0.26 |
| Pro | 16 | . | . | B | B | . | . | . | −0.59 | 0.51 | . | . | . | −0.60 | 0.37 |
| Val | 17 | . | . | B | B | . | . | . | −0.59 | 0.50 | . | . | . | −0.60 | 1.00 |
| His | 18 | . | . | B | B | . | . | . | −0.30 | 0.61 | * | . | F | −0.45 | 0.61 |
| Thr | 19 | . | . | B | B | . | . | . | 0.41 | 0.61 | * | . | F | −0.45 | 0.53 |
| Thr | 20 | . | . | B | B | . | . | . | 0.41 | 0.19 | . | . | F | 0.00 | 1.44 |
| Leu | 21 | A | . | . | B | . | . | . | 0.62 | −0.07 | . | . | F | 0.60 | 1.41 |
| Ser | 22 | A | . | . | . | . | T | . | 0.89 | −0.57 | . | * | F | 1.30 | 1.64 |
| Lys | 23 | A | . | . | . | . | T | . | 0.97 | −0.56 | . | . | F | 1.30 | 1.15 |
| Ser | 24 | A | . | . | . | . | T | . | 1.32 | −1.04 | . | . | F | 1.30 | 2.78 |
| Asp | 25 | A | . | . | . | . | T | . | 1.04 | −1.73 | . | . | F | 1.30 | 4.15 |
| Ala | 26 | A | A | . | . | . | . | . | 1.27 | −1.61 | . | . | F | 0.90 | 2.09 |
| Lys | 27 | A | A | . | . | . | . | . | 1.27 | −1.11 | * | . | F | 0.90 | 1.58 |
| Lys | 28 | A | A | . | . | . | . | . | 1.27 | −1.11 | * | * | F | 0.90 | 1.27 |
| Ala | 29 | A | A | . | . | . | . | . | 1.26 | −1.11 | * | . | F | 0.90 | 2.51 |
| Ala | 30 | A | A | . | . | . | . | . | 0.44 | −1.13 | * | . | F | 0.90 | 1.81 |
| Ser | 31 | A | A | . | . | . | . | . | 0.22 | −0.44 | * | . | F | 0.45 | 0.75 |
| Lys | 32 | A | A | . | . | . | . | . | 0.18 | 0.24 | . | . | F | −0.15 | 0.61 |
| Thr | 33 | A | A | . | . | . | . | . | 0.18 | −0.26 | . | . | F | 0.60 | 1.04 |
| Leu | 34 | A | A | . | . | . | . | . | 0.47 | −0.76 | . | . | F | 0.90 | 1.56 |
| Leu | 35 | A | A | . | . | . | . | . | 1.06 | −0.76 | . | . | F | 0.90 | 1.04 |
| Glu | 36 | A | A | . | . | . | . | . | 0.66 | −0.36 | . | . | F | 0.60 | 1.25 |
| Lys | 37 | A | A | . | . | . | . | . | 0.31 | −0.06 | . | . | F | 0.94 | 1.32 |
| Ser | 38 | A | A | . | . | . | . | . | 0.62 | −0.36 | . | * | F | 1.28 | 2.14 |
| Gln | 39 | A | A | . | . | . | . | . | 1.48 | −1.04 | . | * | F | 1.92 | 2.06 |
| Phe | 40 | . | . | . | . | T | T | . | 2.08 | −1.04 | . | . | F | 3.06 | 2.06 |
| Ser | 41 | . | . | . | . | T | T | . | 1.22 | −0.61 | . | . | F | 3.40 | 2.38 |
| Asp | 42 | . | . | . | . | T | T | . | 1.18 | −0.36 | . | * | F | 2.76 | 1.02 |
| Lys | 43 | . | . | . | . | . | T | C | 1.48 | −0.36 | . | * | F | 2.39 | 2.04 |
| Pro | 44 | . | . | . | . | . | . | C | 1.59 | −1.14 | . | * | F | 2.32 | 2.54 |
| Val | 45 | . | . | B | . | . | . | . | 1.94 | −1.53 | . | . | F | 1.95 | 2.98 |
| Gln | 46 | . | . | B | . | . | . | . | 1.43 | −1.10 | . | * | F | 1.78 | 1.47 |
| Asp | 47 | . | . | B | . | . | T | . | 0.58 | −0.41 | . | . | F | 1.70 | 0.79 |
| Arg | 48 | . | . | B | . | . | T | . | −0.32 | −0.20 | . | . | F | 1.53 | 0.79 |
| Gly | 49 | . | . | B | . | . | T | . | −0.42 | −0.20 | . | * | F | 1.36 | 0.34 |
| Leu | 50 | . | . | B | . | . | T | . | 0.43 | −0.11 | . | * | . | 1.04 | 0.29 |
| Val | 51 | . | . | B | B | . | . | . | −0.38 | −0.11 | . | * | . | 0.47 | 0.25 |
| Val | 52 | . | . | B | B | . | . | . | −0.33 | 0.57 | . | * | . | −0.60 | 0.21 |
| Thr | 53 | . | . | B | B | . | . | . | −1.03 | 0.14 | . | * | F | −0.15 | 0.50 |
| Asp | 54 | A | . | . | B | . | . | . | −0.69 | −0.04 | . | * | F | 0.45 | 0.68 |
| Leu | 55 | A | A | . | . | . | . | . | −0.18 | −0.69 | . | * | F | 0.90 | 1.59 |
| Lys | 56 | A | A | . | . | . | . | . | −0.18 | −0.94 | . | * | F | 0.90 | 1.48 |
| Ala | 57 | A | A | . | . | . | . | . | −0.18 | −0.79 | . | * | F | 0.75 | 0.66 |
| Glu | 58 | A | A | . | B | . | . | . | −0.68 | −0.14 | . | * | F | 0.45 | 0.59 |
| Ser | 59 | A | A | . | B | . | . | . | −0.68 | −0.14 | . | * | F | 0.45 | 0.24 |
| Val | 60 | A | A | . | B | . | . | . | 0.10 | −0.14 | . | * | . | 0.30 | 0.42 |
| Val | 61 | A | A | . | B | . | . | . | 0.17 | −0.14 | . | * | . | 0.30 | 0.33 |
| Leu | 62 | A | A | . | B | . | . | . | 0.46 | −0.14 | . | * | . | 0.30 | 0.48 |
| Glu | 63 | A | A | . | B | . | . | . | 0.21 | −0.14 | . | * | . | 0.30 | 0.87 |
| His | 64 | A | . | . | . | . | T | . | −0.16 | −0.03 | . | * | . | 0.85 | 1.83 |
| Arg | 65 | A | . | . | . | . | T | . | 0.40 | −0.10 | . | * | . | 0.85 | 1.19 |
| Ser | 66 | A | . | . | . | . | T | . | 0.67 | −0.40 | . | * | . | 0.70 | 0.92 |
| Tyr | 67 | A | . | . | . | . | T | . | 1.52 | 0.10 | . | * | . | 0.10 | 0.68 |
| Cys | 68 | A | A | . | . | . | . | . | 0.93 | −0.40 | . | * | . | 0.30 | 0.70 |
| Ser | 69 | A | A | . | . | . | . | . | 1.08 | 0.10 | . | * | . | −0.30 | 0.53 |
| Ala | 70 | A | A | . | . | . | . | . | 0.97 | −0.29 | . | * | . | 0.30 | 0.66 |
| Lys | 71 | A | A | . | . | . | . | . | 1.38 | −1.04 | . | * | F | 0.90 | 2.05 |
| Ala | 72 | A | A | . | . | . | . | . | 1.59 | −1.61 | . | * | F | 0.90 | 3.00 |
| Arg | 73 | A | A | . | . | . | . | . | 1.56 | −1.50 | . | * | F | 0.90 | 4.04 |
| Asp | 74 | A | A | . | . | . | . | . | 1.27 | −1.21 | . | * | F | 0.90 | 1.75 |
| Arg | 75 | A | A | . | . | . | . | . | 1.51 | −0.71 | . | * | . | 0.75 | 1.75 |
| His | 76 | . | A | B | . | . | . | . | 1.47 | −0.79 | . | * | . | 0.60 | 0.88 |
| Phe | 77 | . | A | B | . | . | . | . | 1.20 | −0.79 | . | * | . | 0.60 | 0.88 |
| Ala | 78 | . | A | B | . | . | . | . | 0.28 | −0.14 | . | * | . | 0.30 | 0.33 |
| Gly | 79 | . | . | B | B | . | . | . | −0.07 | 0.54 | . | . | . | −0.60 | 0.20 |
| Asp | 80 | . | . | . | B | T | . | . | −0.42 | 0.47 | * | . | . | −0.20 | 0.23 |
| Val | 81 | . | . | B | B | . | . | . | −1.24 | 0.44 | * | * | . | −0.60 | 0.36 |
| Leu | 82 | . | . | B | B | . | . | . | −0.86 | 0.59 | . | * | . | −0.60 | 0.27 |
| Gly | 83 | . | . | B | B | . | . | . | −0.48 | 0.64 | . | . | . | −0.60 | 0.23 |
| Tyr | 84 | . | . | B | B | . | . | . | −0.42 | 1.07 | . | . | . | −0.60 | 0.49 |
| Val | 85 | . | . | B | B | . | . | . | −0.42 | 1.34 | . | . | . | −0.60 | 0.62 |
| Thr | 86 | . | . | B | B | . | . | . | 0.13 | 1.06 | . | . | . | −0.45 | 1.01 |
| Pro | 87 | . | . | B | B | . | . | . | 0.91 | 1.01 | . | . | F | −0.45 | 0.86 |
| Trp | 88 | . | . | . | . | T | . | . | 0.91 | 0.76 | . | . | F | 0.30 | 1.58 |
| Asn | 89 | . | . | . | . | . | T | C | 0.91 | 0.54 | . | . | F | 0.30 | 1.08 |
| Ser | 90 | . | . | . | . | . | T | C | 1.17 | 0.81 | * | . | . | 0.15 | 1.10 |
| His | 91 | . | . | . | . | . | T | C | 1.12 | 0.39 | . | . | . | 0.45 | 1.74 |
| Gly | 92 | . | . | . | . | T | T | . | 1.12 | 0.11 | * | . | . | 0.50 | 0.80 |
| Tyr | 93 | . | . | . | B | T | . | . | 1.46 | 0.20 | * | . | . | 0.10 | 0.87 |
| Asp | 94 | . | . | B | B | . | . | . | 0.60 | −0.19 | * | . | . | 0.45 | 1.27 |
| Val | 95 | . | . | B | B | . | . | . | 0.20 | −0.04 | * | . | . | 0.30 | 0.95 |
| Thr | 96 | . | . | B | B | . | . | . | −0.11 | 0.31 | * | . | . | −0.30 | 0.53 |
| Lys | 97 | . | . | B | B | . | . | . | −0.07 | −0.01 | * | . | F | 0.45 | 0.31 |
| Val | 98 | . | . | B | B | . | . | . | 0.22 | 0.37 | * | . | F | −0.15 | 0.56 |
| Phe | 99 | . | . | B | B | . | . | . | −0.48 | −0.27 | * | . | F | 0.45 | 0.78 |
| Gly | 100 | . | . | . | B | T | . | . | 0.07 | 0.03 | * | . | F | 0.25 | 0.34 |
| Ser | 101 | . | . | B | B | . | . | . | 0.38 | 0.51 | * | . | F | −0.45 | 0.66 |
| Lys | 102 | . | . | B | B | . | . | . | −0.56 | 0.27 | * | . | F | 0.00 | 1.32 |
| Phe | 103 | . | . | . | B | T | . | . | 0.00 | 0.17 | . | . | F | 0.25 | 0.93 |
| Thr | 104 | . | . | B | B | . | . | . | 0.49 | 0.13 | * | . | F | −0.15 | 0.93 |
| Gln | 105 | . | . | B | B | . | . | . | −0.02 | 0.17 | . | . | F | −0.15 | 0.72 |
| Ile | 106 | . | . | B | B | . | . | . | −0.01 | 0.81 | . | . | F | −0.45 | 0.62 |
| Ser | 107 | . | . | B | B | . | . | . | −0.87 | 0.94 | * | . | F | −0.45 | 0.45 |
| Pro | 108 | . | . | B | B | . | . | . | −0.17 | 1.14 | * | . | . | −0.60 | 0.21 |
| Val | 109 | . | A | B | B | . | . | . | −0.67 | 1.14 | . | * | . | −0.60 | 0.53 |
| Trp | 110 | . | A | B | B | . | . | . | −0.62 | 1.14 | * | . | . | −0.60 | 0.33 |
| Leu | 111 | . | A | B | B | . | . | . | 0.38 | 0.76 | * | * | . | −0.30 | 0.42 |
| Gln | 112 | . | A | B | B | . | . | . | 0.79 | 0.33 | * | * | . | 0.45 | 1.11 |
| Leu | 113 | . | A | B | B | . | . | . | 0.66 | −0.31 | * | * | . | 1.35 | 2.07 |
| Lys | 114 | . | A | . | B | . | . | C | 1.62 | −0.80 | * | * | F | 2.30 | 2.49 |
| Arg | 115 | . | . | . | . | . | T | C | 1.91 | −1.49 | * | * | F | 3.00 | 2.81 |
| Arg | 116 | . | . | . | . | . | T | C | 2.12 | −1.89 | * | * | F | 2.70 | 5.90 |
| Gly | 117 | . | . | . | . | . | T | C | 1.42 | −1.96 | * | * | F | 2.40 | 2.92 |
| Arg | 118 | . | . | . | . | . | T | C | 2.23 | −1.17 | * | * | F | 2.10 | 1.29 |
| Glu | 119 | A | A | B | . | . | . | . | 1.33 | −1.17 | * | * | . | 1.05 | 1.14 |
| Met | 120 | A | A | . | B | . | . | . | 0.91 | −0.53 | * | * | . | 0.60 | 0.86 |
| Phe | 121 | A | A | . | B | . | . | . | 0.46 | −0.47 | . | * | . | 0.30 | 0.63 |
| Glu | 122 | A | A | . | B | . | . | . | −0.01 | −0.04 | . | * | . | 0.30 | 0.36 |
| Val | 123 | A | A | . | B | . | . | . | −0.16 | 0.64 | . | * | . | −0.60 | 0.30 |
| Thr | 124 | A | A | . | B | . | . | . | −0.16 | 0.53 | . | . | . | −0.60 | 0.47 |
| Gly | 125 | A | A | . | B | . | . | . | −0.41 | −0.26 | . | * | . | 0.30 | 0.46 |
| Leu | 126 | A | . | . | B | . | . | . | 0.29 | 0.39 | . | * | . | −0.30 | 0.46 |
| His | 127 | A | . | . | B | . | . | . | 0.29 | −0.26 | . | . | . | 0.30 | 0.53 |
| Asp | 128 | A | . | . | . | . | . | . | 0.80 | −0.34 | * | . | . | 0.50 | 0.92 |
| Val | 129 | A | . | . | . | . | . | . | 0.82 | −0.34 | * | . | F | 0.80 | 1.11 |
| Asp | 130 | A | . | . | . | . | T | . | 0.57 | −0.11 | * | . | F | 0.85 | 0.86 |
| Gln | 131 | A | . | . | . | . | T | . | 1.49 | 0.00 | * | . | F | 0.25 | 0.51 |
| Gly | 132 | A | . | . | . | . | T | . | 0.93 | 0.00 | * | . | F | 0.40 | 1.34 |
| Trp | 133 | A | . | . | . | . | T | . | 0.08 | −0.14 | * | . | . | 0.70 | 0.81 |
| Met | 134 | A | A | . | . | . | . | . | 1.04 | 0.50 | * | . | . | −0.60 | 0.35 |
| Arg | 135 | A | A | . | . | . | . | . | 1.09 | 0.10 | * | . | . | −0.30 | 0.69 |
| Ala | 136 | A | A | . | . | . | . | . | 1.06 | −0.33 | * | . | . | 0.45 | 1.30 |
| Val | 137 | A | A | . | . | . | . | . | 0.81 | −0.74 | * | * | . | 0.75 | 1.79 |
| Arg | 138 | A | A | . | . | . | . | . | 1.14 | −0.86 | * | * | . | 0.60 | 0.93 |
| Lys | 139 | A | A | . | . | . | . | . | 1.40 | −0.86 | * | . | F | 0.90 | 1.83 |
| His | 140 | A | A | . | . | . | . | . | 0.48 | −0.93 | * | . | F | 0.90 | 2.44 |
| Ala | 141 | A | A | . | . | . | . | . | 1.03 | −0.89 | * | * | F | 0.90 | 1.03 |
| Lys | 142 | A | A | . | . | . | . | . | 1.00 | −0.39 | * | * | F | 0.45 | 0.70 |
| Gly | 143 | . | A | B | . | . | . | . | 0.03 | 0.30 | * | . | . | −0.30 | 0.36 |
| Leu | 144 | . | A | B | . | . | . | . | −0.22 | 0.44 | * | . | . | −0.60 | 0.26 |
| His | 145 | . | A | B | . | . | . | . | −0.08 | 0.37 | * | * | . | −0.30 | 0.20 |
| Ile | 146 | . | A | B | . | . | . | . | −0.30 | 0.37 | * | * | . | −0.30 | 0.41 |
| Val | 147 | . | A | B | . | . | . | . | −1.16 | 0.63 | * | * | . | −0.60 | 0.41 |
| Pro | 148 | . | A | B | . | . | . | . | −1.51 | 0.63 | * | * | . | −0.60 | 0.25 |
| Arg | 149 | . | A | B | . | . | . | . | −0.70 | 0.91 | * | * | . | −0.60 | 0.30 |
| Leu | 150 | . | A | B | . | . | . | . | −0.67 | 0.23 | * | * | . | −0.30 | 0.71 |
| Leu | 151 | . | A | B | . | . | . | . | −0.07 | −0.41 | * | * | . | 0.30 | 0.76 |
| Phe | 152 | . | A | B | . | . | . | . | 0.48 | 0.07 | * | . | . | −0.30 | 0.41 |
| Glu | 153 | A | A | . | . | . | . | . | 0.44 | 0.56 | . | * | . | −0.60 | 0.72 |
| Asp | 154 | . | A | . | . | T | . | . | 0.33 | 0.63 | . | * | . | −0.05 | 1.37 |
| Trp | 155 | . | A | . | . | T | . | . | 1.14 | −0.06 | . | . | . | 1.19 | 2.63 |
| Thr | 156 | A | A | . | . | . | . | . | 1.26 | −0.84 | * | * | . | 1.43 | 2.54 |
| Tyr | 157 | . | . | . | . | T | T | . | 2.07 | −0.06 | * | . | . | 2.27 | 1.32 |
| Asp | 158 | . | . | . | . | T | T | . | 2.07 | −0.06 | * | . | F | 2.76 | 2.45 |
| Asp | 159 | . | . | . | . | T | T | . | 1.21 | −0.57 | * | . | F | 3.40 | 2.73 |
| Phe | 160 | . | . | . | . | T | T | . | 0.69 | −0.41 | * | * | F | 2.76 | 1.29 |
| Arg | 161 | . | . | B | B | . | . | . | 1.00 | −0.49 | * | * | F | 1.47 | 0.64 |
| Asn | 162 | . | . | B | B | . | . | . | 0.94 | −0.49 | * | * | . | 0.98 | 0.64 |
| Val | 163 | . | . | . | B | . | . | C | 0.94 | −0.10 | * | * | . | 0.84 | 0.99 |
| Leu | 164 | . | . | . | B | . | . | C | 0.94 | −0.89 | * | * | F | 0.95 | 0.87 |
| Asp | 165 | A | . | . | . | . | T | . | 1.64 | −0.89 | * | * | F | 1.15 | 0.91 |
| Ser | 166 | A | . | . | . | . | T | . | 0.64 | −1.29 | * | * | F | 1.30 | 2.12 |
| Glu | 167 | A | . | . | . | . | T | . | 0.64 | −1.24 | * | . | F | 1.30 | 1.80 |
| Asp | 168 | A | . | . | . | . | T | . | 1.50 | −1.93 | * | . | F | 1.30 | 1.87 |
| Glu | 169 | A | A | . | . | . | . | . | 1.50 | −1.93 | . | * | F | 0.90 | 2.41 |
| Ile | 170 | A | A | . | . | . | . | . | 1.20 | −1.63 | * | . | F | 0.90 | 1.15 |
| Glu | 171 | A | A | . | . | . | . | . | 1.54 | −1.24 | * | . | F | 0.75 | 0.92 |
| Glu | 172 | A | A | . | . | . | . | . | 1.23 | −1.24 | * | . | F | 0.90 | 1.07 |
| Leu | 173 | A | A | . | . | . | . | . | 0.38 | −0.76 | * | . | F | 0.90 | 2.19 |
| Ser | 174 | A | . | . | B | . | . | . | −0.48 | −0.80 | * | . | F | 0.75 | 0.94 |
| Lys | 175 | A | . | . | B | . | . | . | 0.41 | −0.16 | * | . | F | 0.45 | 0.40 |
| Thr | 176 | A | . | . | B | . | . | . | −0.44 | 0.24 | * | . | F | −0.15 | 0.85 |
| Val | 177 | A | . | . | B | . | . | . | −1.03 | 0.20 | * | . | . | −0.30 | 0.47 |
| Val | 178 | A | . | . | B | . | . | . | −0.18 | 0.31 | * | . | . | −0.30 | 0.24 |
| Gln | 179 | A | . | . | B | . | . | . | 0.12 | 0.31 | * | . | . | −0.30 | 0.33 |
| Val | 180 | A | . | . | B | . | . | . | 0.08 | 0.23 | * | . | . | −0.30 | 0.71 |
| Ala | 181 | . | . | B | B | . | . | . | 0.36 | −0.01 | . | . | . | 0.45 | 1.66 |
| Lys | 182 | A | . | . | B | . | . | . | 0.51 | −0.16 | . | . | F | 0.70 | 1.30 |
| Asn | 183 | . | . | B | . | . | . | . | 1.37 | 0.23 | . | . | F | 0.40 | 1.52 |
| Gln | 184 | . | . | B | . | . | . | . | 1.02 | −0.41 | . | . | F | 1.10 | 2.51 |
| His | 185 | . | . | . | . | . | T | C | 1.18 | −0.49 | . | . | F | 1.60 | 1.24 |
| Phe | 186 | . | . | . | . | T | T | . | 0.91 | 0.30 | . | . | . | 1.00 | 0.67 |
| Asp | 187 | . | . | B | . | . | T | . | 0.01 | 0.54 | . | . | . | 0.20 | 0.29 |
| Gly | 188 | . | . | B | . | . | T | . | 0.01 | 0.79 | * | . | . | 0.10 | 0.16 |
| Phe | 189 | . | . | B | B | . | . | . | −0.84 | 0.29 | * | . | . | −0.10 | 0.31 |
| Val | 190 | . | . | B | B | . | . | . | −1.10 | 0.14 | * | . | . | −0.20 | 0.14 |
| Val | 191 | . | . | B | B | . | . | . | −0.40 | 1.06 | * | . | . | −0.60 | 0.15 |
| Glu | 192 | A | . | . | B | . | . | . | −0.40 | 1.03 | * | . | . | −0.60 | 0.27 |
| Val | 193 | A | . | . | B | . | . | . | −0.87 | 0.64 | * | . | . | −0.60 | 0.64 |
| Trp | 194 | A | . | . | B | . | . | . | −0.98 | 0.69 | * | . | . | −0.60 | 0.71 |
| Asn | 195 | A | . | . | B | . | . | . | −0.42 | 0.73 | * | . | . | −0.60 | 0.34 |
| Gln | 196 | A | . | . | B | . | . | . | 0.43 | 1.11 | . | . | . | −0.60 | 0.61 |
| Leu | 197 | A | . | . | B | . | . | . | 0.48 | 0.87 | * | . | F | −0.30 | 1.01 |
| Leu | 198 | A | . | . | B | . | . | . | 1.44 | −0.04 | . | . | F | 0.78 | 1.25 |
| Ser | 199 | . | . | . | B | . | . | C | 0.88 | −0.44 | . | * | F | 1.16 | 1.42 |
| Gln | 200 | . | . | . | B | T | . | . | 0.57 | −0.20 | . | . | F | 1.54 | 1.28 |
| Lys | 201 | . | . | B | B | . | . | . | 0.57 | −0.40 | . | * | F | 1.32 | 2.23 |
| Arg | 202 | . | . | B | B | . | . | . | 1.38 | −1.09 | * | * | F | 1.80 | 2.78 |
| Val | 203 | . | . | B | B | . | . | . | 1.38 | −1.07 | * | . | F | 1.62 | 2.78 |
| Thr | 204 | . | . | B | B | . | . | . | 1.33 | −0.79 | * | * | F | 1.44 | 1.15 |
| Asp | 205 | . | . | B | . | . | T | . | 0.73 | −0.36 | * | * | F | 1.21 | 0.58 |
| Gln | 206 | A | . | . | . | . | T | . | −0.01 | 0.26 | * | . | . | 0.28 | 0.77 |
| Leu | 207 | A | . | . | . | . | T | . | −0.43 | 0.40 | * | * | . | −0.20 | 0.46 |
| Gly | 208 | A | . | . | . | . | T | . | 0.39 | 0.40 | * | . | . | −0.20 | 0.40 |
| Met | 209 | A | A | . | . | . | . | . | 0.74 | 0.90 | . | . | . | −0.60 | 0.31 |
| Phe | 210 | A | A | . | . | . | . | . | 0.74 | 0.50 | . | . | . | −0.60 | 0.76 |
| Thr | 211 | A | A | . | . | . | . | . | 0.04 | −0.19 | * | . | . | 0.45 | 1.34 |
| His | 212 | A | A | . | . | . | . | . | 0.86 | 0.17 | . | . | . | −0.15 | 1.17 |
| Lys | 213 | A | A | . | . | . | . | . | 1.20 | −0.44 | * | . | F | 0.60 | 2.34 |
| Glu | 214 | A | A | . | . | . | . | . | 0.99 | −0.83 | * | . | F | 0.90 | 2.81 |
| Phe | 215 | A | A | . | . | . | . | . | 1.10 | −0.63 | * | . | F | 0.90 | 1.70 |
| Glu | 216 | A | A | . | . | . | . | . | 1.20 | −0.63 | * | . | F | 0.75 | 0.86 |
| Gln | 217 | A | A | . | . | . | . | . | 0.38 | −0.20 | * | . | . | 0.30 | 0.77 |
| Leu | 218 | A | A | . | . | . | . | . | −0.48 | 0.44 | * | . | . | −0.60 | 0.66 |
| Ala | 219 | A | A | . | . | . | . | . | −0.48 | 0.34 | * | . | . | −0.30 | 0.31 |
| Pro | 220 | A | . | . | . | . | . | . | −0.12 | 0.34 | * | . | . | −0.10 | 0.30 |
| Val | 221 | A | . | . | . | . | . | . | −0.82 | 0.37 | * | . | . | −0.10 | 0.36 |
| Leu | 222 | A | . | . | . | . | . | . | −1.12 | 0.47 | . | . | . | −0.40 | 0.31 |
| Asp | 223 | A | . | . | . | . | T | . | −1.12 | 0.36 | . | . | . | 0.10 | 0.27 |
| Gly | 224 | . | . | B | . | . | T | . | −1.13 | 0.61 | . | . | . | −0.20 | 0.30 |
| Phe | 225 | . | . | B | . | . | T | . | −1.23 | 0.59 | . | . | . | −0.20 | 0.36 |
| Ser | 226 | . | . | B | . | . | T | . | −0.62 | 0.39 | . | . | . | 0.10 | 0.31 |
| Leu | 227 | . | . | B | . | . | . | . | 0.19 | 1.14 | . | . | . | −0.40 | 0.49 |
| Met | 228 | . | . | B | . | . | . | . | −0.06 | 0.71 | . | . | . | −0.40 | 0.95 |
| Thr | 229 | . | . | B | . | . | T | . | −0.01 | 0.69 | . | . | . | −0.05 | 1.11 |
| Tyr | 230 | . | . | . | . | T | T | . | 0.38 | 0.69 | . | . | . | 0.35 | 1.80 |
| Asp | 231 | . | . | . | . | T | T | . | 0.09 | 0.49 | . | . | . | 0.35 | 2.62 |
| Tyr | 232 | . | . | . | . | T | T | . | 0.87 | 0.37 | . | . | . | 0.65 | 1.84 |
| Ser | 233 | . | . | B | . | . | . | . | 1.47 | 0.39 | . | . | . | 0.05 | 1.59 |
| Thr | 234 | . | . | B | . | . | . | . | 1.57 | 0.03 | . | . | . | 0.05 | 1.65 |
| Ala | 235 | . | . | B | . | . | . | . | 1.47 | 0.46 | . | . | . | −0.25 | 1.63 |
| His | 236 | . | . | B | . | . | . | . | 1.26 | 0.13 | . | . | F | 0.20 | 1.21 |
| Gln | 237 | . | . | . | . | . | . | C | 1.50 | 0.17 | . | . | F | 0.40 | 1.29 |
| Pro | 238 | . | . | . | . | . | . | C | 1.21 | 0.09 | . | . | F | 0.40 | 2.06 |
| Gly | 239 | . | . | . | . | . | T | C | 1.31 | 0.09 | . | . | F | 0.60 | 1.53 |
| Pro | 240 | . | . | . | . | T | T | . | 1.09 | 0.01 | . | . | F | 0.80 | 1.36 |
| Asn | 241 | . | . | . | . | . | T | C | 0.82 | 0.30 | . | * | F | 0.45 | 0.73 |
| Ala | 242 | . | . | . | . | . | T | C | 0.53 | 0.26 | . | . | F | 0.45 | 0.98 |
| Pro | 243 | . | . | B | . | . | . | . | −0.11 | 0.74 | * | . | . | −0.40 | 0.67 |
| Leu | 244 | . | . | B | B | . | . | . | 0.34 | 0.96 | * | . | . | −0.60 | 0.31 |
| Ser | 245 | . | . | B | B | . | . | . | −0.03 | 0.56 | * | . | . | −0.60 | 0.60 |
| Trp | 246 | . | . | B | B | . | . | . | −0.70 | 0.56 | * | * | . | −0.60 | 0.39 |
| Val | 247 | . | . | B | B | . | . | . | −0.97 | 0.70 | * | * | . | −0.60 | 0.25 |
| Arg | 248 | . | . | B | B | . | . | . | −0.76 | 0.66 | * | * | . | −0.60 | 0.14 |
| Ala | 249 | . | . | B | B | . | . | . | −0.80 | 0.67 | * | * | . | −0.60 | 0.23 |
| Cys | 250 | . | . | B | B | . | . | . | −1.31 | 0.40 | * | * | . | −0.60 | 0.23 |
| Val | 251 | . | . | B | B | . | . | . | −1.02 | 0.44 | * | * | . | −0.60 | 0.10 |
| Gln | 252 | . | . | B | B | . | . | . | −0.38 | 0.44 | * | * | . | −0.60 | 0.16 |
| Val | 253 | . | . | B | B | . | . | . | −0.44 | 0.37 | * | * | . | 0.04 | 0.47 |
| Leu | 254 | . | . | B | B | . | . | . | −0.16 | −0.20 | . | * | . | 1.13 | 1.25 |
| Asp | 255 | . | . | B | . | . | T | . | 0.56 | −0.46 | . | * | F | 1.87 | 0.97 |
| Pro | 256 | . | . | . | . | T | T | . | 1.12 | −0.86 | . | * | F | 3.06 | 2.62 |
| Lys | 257 | . | . | . | . | T | T | . | 1.23 | −0.59 | . | * | F | 3.40 | 3.34 |
| Ser | 258 | A | . | . | . | . | T | . | 1.79 | −1.27 | . | * | F | 2.66 | 3.91 |
| Lys | 259 | A | . | . | . | . | . | . | 2.64 | −0.89 | . | * | F | 2.12 | 3.39 |
| Trp | 260 | A | . | . | . | . | T | . | 1.76 | −1.31 | . | * | F | 1.98 | 3.39 |
| Arg | 261 | A | . | . | . | . | T | . | 1.16 | −0.63 | . | * | F | 1.64 | 1.77 |
| Ser | 262 | . | . | B | . | . | T | . | 0.30 | −0.33 | . | * | F | 0.85 | 0.73 |
| Lys | 263 | . | . | B | . | . | T | . | 0.26 | 0.36 | . | * | F | 0.25 | 0.57 |
| Ile | 264 | . | . | B | B | . | . | . | −0.60 | −0.13 | . | * | . | 0.30 | 0.29 |
| Leu | 265 | . | . | B | B | . | . | . | −0.31 | 0.56 | . | * | . | −0.60 | 0.18 |
| Leu | 266 | . | . | B | B | . | . | . | −1.12 | 0.57 | . | * | . | −0.60 | 0.14 |
| Gly | 267 | . | . | B | B | . | . | . | −1.07 | 1.36 | . | * | . | −0.60 | 0.18 |
| Leu | 268 | . | . | B | . | . | . | . | −1.46 | 1.43 | . | * | . | −0.40 | 0.34 |
| Asn | 269 | . | . | B | . | . | . | . | −1.17 | 1.17 | . | * | . | −0.40 | 0.40 |
| Phe | 270 | . | . | B | . | . | . | . | −0.36 | 1.10 | . | . | . | −0.40 | 0.40 |
| Tyr | 271 | . | . | B | . | . | . | . | 0.21 | 0.67 | . | * | . | −0.40 | 0.82 |
| Gly | 272 | . | . | B | . | . | T | . | −0.03 | 0.74 | . | . | . | −0.20 | 0.80 |
| Met | 273 | . | . | B | . | . | T | . | 0.47 | 0.84 | . | . | . | −0.20 | 0.93 |
| Asp | 274 | . | . | B | . | . | T | . | 0.17 | 0.54 | . | . | . | −0.20 | 0.86 |
| Tyr | 275 | A | . | . | . | . | T | . | 0.91 | 0.17 | . | . | . | 0.25 | 1.16 |
| Ala | 276 | A | . | . | . | . | . | . | 1.16 | −0.26 | . | . | . | 0.65 | 2.34 |
| Thr | 277 | A | . | . | . | . | . | . | 0.91 | −0.87 | . | * | F | 1.10 | 2.34 |
| Ser | 278 | A | . | . | . | . | T | . | 1.62 | −0.37 | * | . | F | 1.00 | 1.51 |
| Lys | 279 | A | . | . | . | . | T | . | 1.62 | −1.13 | . | . | F | 1.30 | 2.93 |
| Asp | 280 | A | . | . | . | . | T | . | 1.66 | −1.63 | * | * | F | 1.30 | 3.52 |
| Ala | 281 | A | . | . | . | . | T | . | 1.39 | −1.69 | . | . | F | 1.30 | 4.06 |
| Arg | 282 | . | . | B | . | . | . | . | 0.84 | −1.43 | . | . | F | 1.10 | 1.51 |
| Glu | 283 | . | . | B | B | . | . | . | 0.80 | −0.79 | * | . | F | 0.75 | 0.67 |
| Pro | 284 | . | . | B | B | . | . | . | 0.17 | −0.36 | * | . | F | 0.45 | 0.66 |
| Val | 285 | . | . | B | B | . | . | . | 0.28 | −0.36 | * | * | . | 0.30 | 0.34 |
| Val | 286 | . | . | B | B | . | . | . | 0.62 | −0.36 | * | . | . | 0.30 | 0.38 |
| Gly | 287 | . | . | B | . | . | T | . | −0.38 | 0.40 | * | . | . | −0.20 | 0.39 |
| Ala | 288 | . | . | B | . | . | T | . | −0.38 | 0.66 | . | . | . | −0.20 | 0.37 |
| Arg | 289 | . | . | B | . | . | T | . | −0.48 | 0.41 | * | . | . | −0.20 | 0.85 |
| Tyr | 290 | . | . | B | . | . | T | . | −0.43 | 0.26 | * | * | . | 0.25 | 1.25 |
| Ile | 291 | . | A | B | B | . | . | . | 0.47 | 0.51 | * | * | . | −0.45 | 1.02 |
| Gln | 292 | . | A | B | B | . | . | . | 0.81 | 0.01 | * | . | . | −0.15 | 1.04 |
| Thr | 293 | . | A | B | B | . | . | . | 1.37 | 0.01 | * | * | F | 0.00 | 1.11 |
| Leu | 294 | . | A | B | B | . | . | . | 1.37 | −0.24 | * | . | F | 0.90 | 2.15 |
| Lys | 295 | . | A | . | B | T | . | . | 1.40 | −0.93 | . | * | F | 1.90 | 2.43 |
| Asp | 296 | . | A | . | . | T | . | . | 2.40 | −0.90 | . | * | F | 2.20 | 2.60 |
| His | 297 | . | A | . | . | . | . | C | 1.80 | −1.39 | . | * | F | 2.30 | 6.18 |
| Arg | 298 | . | . | . | . | . | T | C | 1.26 | −1.46 | . | * | F | 3.00 | 3.06 |
| Pro | 299 | . | . | B | . | . | T | . | 1.78 | −0.81 | . | * | F | 2.50 | 1.36 |
| Arg | 300 | . | . | B | . | . | T | . | 1.73 | 0.10 | . | * | . | 1.15 | 1.05 |
| Met | 301 | . | . | B | . | . | T | . | 1.43 | −0.40 | . | * | . | 1.30 | 0.90 |
| Val | 302 | . | . | B | . | . | . | . | 1.47 | −0.01 | . | * | . | 0.80 | 0.78 |
| Trp | 303 | . | . | B | . | . | T | . | 0.97 | −0.04 | . | * | . | 0.70 | 0.69 |
| Asp | 304 | . | . | . | . | . | T | C | 0.88 | 0.39 | . | * | F | 0.45 | 0.89 |
| Ser | 305 | . | . | . | . | . | T | C | 0.77 | 0.16 | . | * | F | 0.60 | 1.60 |
| Gln | 306 | . | . | . | . | . | T | C | 1.33 | −0.49 | . | . | F | 1.20 | 2.64 |
| Xxx | 307 | . | A | . | . | . | . | C | 1.49 | −0.90 | . | . | F | 1.10 | 2.15 |
| Ser | 308 | A | A | . | . | . | . | . | 1.08 | −0.11 | . | . | F | 0.60 | 1.39 |
| Glu | 309 | A | A | . | . | . | . | . | 1.08 | 0.29 | . | . | F | −0.15 | 0.69 |
| His | 310 | A | A | . | . | . | . | . | 1.13 | −0.11 | . | . | . | 0.30 | 0.94 |
| Phe | 311 | A | A | . | . | . | . | . | 1.18 | 0.21 | . | . | . | −0.15 | 1.10 |
| Phe | 312 | A | A | . | . | . | . | . | 1.61 | −0.17 | . | . | . | 0.45 | 1.27 |
| Glu | 313 | A | A | . | . | . | . | . | 1.61 | −0.17 | . | . | . | 0.79 | 1.87 |
| Tyr | 314 | A | A | . | . | . | . | . | 1.72 | −0.29 | . | . | . | 1.13 | 2.89 |
| Lys | 315 | A | A | . | . | . | . | . | 1.46 | −1.07 | . | . | F | 1.92 | 6.53 |
| Lys | 316 | . | A | . | . | T | . | . | 1.81 | −1.47 | . | . | F | 2.66 | 5.05 |
| Ser | 317 | . | . | . | . | T | T | . | 2.62 | −1.04 | * | . | F | 3.40 | 3.19 |
| Arg | 318 | . | . | . | . | T | T | . | 2.59 | −1.80 | * | . | F | 3.06 | 3.13 |
| Ser | 319 | . | . | . | . | T | T | . | 1.98 | −1.30 | * | . | F | 2.72 | 2.13 |
| Gly | 320 | . | . | . | . | T | T | . | 1.08 | −0.66 | * | . | F | 2.38 | 1.18 |
| Arg | 321 | . | . | B | B | . | . | . | 0.33 | −0.40 | . | . | F | 0.79 | 0.45 |
| His | 322 | . | . | B | B | . | . | . | 0.39 | 0.39 | * | . | . | −0.30 | 0.29 |
| Val | 323 | . | . | B | B | . | . | . | 0.07 | 0.76 | * | . | . | −0.60 | 0.46 |
| Val | 324 | . | . | B | B | . | . | . | 0.06 | 0.76 | . | . | . | −0.60 | 0.36 |
| Phe | 325 | . | . | B | B | . | . | . | −0.41 | 1.24 | . | * | . | −0.60 | 0.38 |
| Tyr | 326 | . | . | B | B | . | . | . | −0.48 | 1.43 | . | * | . | −0.60 | 0.42 |
| Pro | 327 | . | . | B | B | . | . | . | −0.74 | 0.79 | . | . | F | −0.30 | 1.14 |
| Thr | 328 | . | A | . | . | T | . | . | −0.70 | 0.53 | . | . | F | 0.10 | 1.77 |
| Leu | 329 | A | A | . | . | . | . | . | 0.16 | 0.43 | * | . | F | −0.45 | 0.93 |
| Lys | 330 | A | A | . | . | . | . | . | 0.00 | 0.07 | . | * | F | 0.00 | 1.04 |
| Ser | 331 | A | A | . | . | . | . | . | 0.36 | 0.29 | . | * | F | −0.15 | 0.54 |
| Leu | 332 | A | A | . | . | . | . | . | −0.24 | −0.20 | . | * | . | 0.45 | 1.28 |
| Gln | 333 | . | A | B | . | . | . | . | 0.07 | −0.20 | . | * | . | 0.30 | 0.53 |
| Val | 334 | . | A | B | . | . | . | . | 0.07 | −0.20 | . | * | . | 0.30 | 0.68 |
| Arg | 335 | A | A | . | . | . | . | . | −0.57 | 0.10 | . | * | . | −0.30 | 0.68 |
| Leu | 336 | A | A | . | . | . | . | . | −0.16 | −0.09 | . | * | . | 0.30 | 0.40 |
| Glu | 337 | A | A | . | . | . | . | . | 0.66 | −0.49 | * | * | . | 0.45 | 1.05 |
| Leu | 338 | A | A | . | . | . | . | . | −0.16 | −1.13 | . | * | . | 0.60 | 0.93 |
| Ala | 339 | A | A | . | . | . | . | . | 0.36 | −0.44 | . | * | . | 0.30 | 0.93 |
| Arg | 340 | A | A | . | . | . | . | . | −0.61 | −0.70 | . | * | . | 0.60 | 0.53 |
| Glu | 341 | A | A | . | B | . | . | . | −0.14 | −0.06 | * | . | . | 0.30 | 0.48 |
| Leu | 342 | A | A | . | B | . | . | . | −1.00 | −0.31 | * | . | . | 0.30 | 0.47 |
| Gly | 343 | A | A | . | B | . | . | . | −0.49 | −0.17 | * | * | . | 0.30 | 0.18 |
| Val | 344 | . | . | B | B | . | . | . | −0.79 | 0.21 | * | . | . | −0.30 | 0.14 |
| Gly | 345 | . | . | B | B | . | . | . | −1.19 | 0.90 | * | . | . | −0.60 | 0.12 |
| Val | 346 | . | . | B | B | . | . | . | −1.19 | 1.13 | . | * | . | −0.60 | 0.12 |
| Ser | 347 | . | . | B | B | . | . | . | −1.19 | 0.70 | . | . | . | −0.60 | 0.29 |
| Ile | 348 | . | . | B | B | . | . | . | −1.19 | 0.74 | . | . | . | −0.60 | 0.24 |
| Trp | 349 | . | . | B | B | . | . | . | −0.33 | 0.74 | . | . | . | −0.60 | 0.32 |
| Glu | 350 | . | . | B | B | . | . | . | −0.33 | 0.50 | * | . | . | −0.51 | 0.41 |
| Leu | 351 | . | . | B | . | . | . | . | −0.29 | 0.54 | . | . | . | −0.22 | 0.58 |
| Gly | 352 | . | . | . | . | T | T | . | 0.01 | 0.54 | * | . | F | 0.62 | 0.46 |
| Gln | 353 | . | . | . | . | T | T | . | 0.66 | −0.37 | * | . | F | 1.61 | 0.44 |
| Gly | 354 | . | . | . | . | . | T | C | 0.24 | 0.39 | * | . | F | 0.90 | 0.84 |
| Leu | 355 | . | . | . | . | . | T | C | 0.00 | 0.49 | * | . | . | 0.36 | 0.73 |
| Asp | 356 | . | . | B | B | . | . | . | 0.81 | 0.81 | * | . | . | −0.33 | 0.66 |
| Tyr | 357 | . | . | B | B | . | . | . | 0.34 | 0.41 | * | . | . | −0.27 | 1.12 |
| Phe | 358 | . | A | B | B | . | . | . | −0.47 | 0.67 | * | . | . | −0.36 | 1.12 |
| Tyr | 359 | . | A | B | B | . | . | . | −0.51 | 0.67 | * | . | . | −0.60 | 0.55 |
| Asp | 360 | . | A | B | B | . | . | . | −0.09 | 1.10 | * | . | . | −0.60 | 0.45 |
| Leu | 361 | . | A | B | B | . | . | . | −0.48 | 0.77 | * | . | . | −0.60 | 0.67 |
| Leu | 362 | A | A | . | B | . | . | . | −0.62 | 0.41 | . | . | . | −0.60 | 0.54 |

[2738] TABLE 4
(Gene No: 113/Clone ID: HCE3Q10)

| Res | Position | I | II | III | IV | V | VI | VII | VIII | IX | X | XI | XII | XIII | XIV |
|---|---|---|---|---|---|---|---|---|---|---|---|---|---|---|---|
| Met | 1 | . | . | B | . | . | . | . | −0.39 | 0.26 | . | . | . | −0.10 | 0.57 |
| Gly | 2 | A | . | . | . | . | . | . | −0.59 | 0.33 | . | . | . | −0.10 | 0.45 |
| Ala | 3 | A | A | . | . | . | . | . | −0.50 | 0.40 | . | . | . | −0.30 | 0.36 |
| Pro | 4 | A | A | . | . | . | . | . | −0.92 | 0.36 | . | . | . | −0.30 | 0.48 |
| Ala | 5 | A | A | . | . | . | . | . | −1.34 | 0.43 | . | . | . | −0.60 | 0.40 |
| Ala | 6 | A | A | . | . | . | . | . | −1.56 | 0.69 | . | . | . | −0.60 | 0.33 |
| Ser | 7 | A | A | . | . | . | . | . | −2.02 | 0.87 | . | . | . | −0.60 | 0.18 |
| Leu | 8 | A | A | . | . | . | . | . | −2.24 | 1.13 | . | . | . | −0.60 | 0.14 |
| Leu | 9 | A | A | . | . | . | . | . | −2.84 | 1.31 | . | . | . | −0.60 | 0.12 |
| Leu | 10 | A | A | . | . | . | . | . | −3.07 | 1.50 | . | . | . | −0.60 | 0.07 |
| Leu | 11 | A | A | . | . | . | . | . | −3.18 | 1.80 | . | . | . | −0.60 | 0.07 |
| Leu | 12 | A | A | . | . | . | . | . | −3.47 | 1.90 | . | . | . | −0.60 | 0.08 |
| Leu | 13 | A | A | . | . | . | . | . | −3.32 | 1.71 | . | . | . | −0.60 | 0.09 |
| Leu | 14 | A | A | . | . | . | . | . | −3.18 | 1.60 | . | . | . | −0.60 | 0.06 |
| Phe | 15 | . | A | B | . | . | . | . | −2.66 | 1.49 | . | . | . | −0.60 | 0.04 |
| Ala | 16 | . | A | B | . | . | . | . | −2.43 | 1.71 | . | . | . | −0.60 | 0.05 |
| Cys | 17 | . | A | B | . | . | . | . | −1.83 | 1.53 | . | . | . | −0.60 | 0.06 |
| Cys | 18 | . | A | B | . | . | . | . | −1.37 | 1.27 | . | . | . | −0.60 | 0.11 |
| Trp | 19 | . | A | B | . | . | . | . | −0.90 | 0.91 | . | . | . | −0.60 | 0.11 |
| Ala | 20 | . | . | . | . | . | T | C | −0.79 | 0.84 | . | . | . | 0.00 | 0.20 |
| Pro | 21 | . | . | . | . | T | T | . | −0.20 | 0.77 | * | . | F | 0.35 | 0.37 |
| Gly | 22 | . | . | . | . | T | T | . | −0.34 | 0.60 | . | . | F | 0.35 | 0.57 |
| Gly | 23 | . | . | . | . | T | T | . | 0.02 | 0.37 | * | . | F | 0.65 | 0.47 |
| Ala | 24 | . | . | . | . | . | . | C | 0.31 | 0.26 | * | . | F | 0.25 | 0.40 |
| Asn | 25 | . | . | . | . | . | . | C | 0.90 | 0.23 | * | * | F | 0.25 | 0.71 |
| Leu | 26 | . | . | B | . | . | . | . | 0.77 | −0.20 | * | * | F | 0.80 | 1.19 |
| Ser | 27 | . | . | B | . | . | T | . | 0.87 | −0.20 | . | * | F | 1.00 | 1.17 |
| Gln | 28 | . | . | . | . | T | T | . | 0.92 | 0.06 | . | * | F | 0.80 | 1.14 |
| Asp | 29 | . | . | . | . | T | T | . | 1.51 | 0.57 | . | * | F | 0.50 | 1.45 |
| Gly | 30 | . | . | . | . | . | T | C | 1.51 | 0.29 | . | * | F | 0.60 | 1.87 |
| Tyr | 31 | . | A | . | . | T | . | . | 2.32 | −0.10 | . | . | . | 0.85 | 1.87 |
| Trp | 32 | . | A | B | . | . | . | . | 2.62 | −0.10 | . | . | F | 0.60 | 1.94 |
| Gln | 33 | . | A | B | . | . | . | . | 1.81 | −0.10 | . | . | F | 0.60 | 3.28 |
| Glu | 34 | . | A | B | . | . | . | . | 1.81 | 0.16 | . | * | F | 0.00 | 1.72 |
| Gln | 35 | A | A | . | . | . | . | . | 1.34 | −0.60 | . | . | F | 0.90 | 2.84 |
| Asp | 36 | A | A | . | . | . | . | . | 1.24 | −0.83 | . | . | F | 0.90 | 1.35 |
| Leu | 37 | A | A | . | . | . | . | . | 1.22 | −0.80 | . | . | F | 0.75 | 0.77 |
| Glu | 38 | A | A | . | . | . | . | . | 0.41 | −0.31 | . | . | F | 0.45 | 0.64 |
| Leu | 39 | A | A | . | . | . | . | . | −0.18 | −0.03 | . | * | . | 0.30 | 0.32 |
| Gly | 40 | A | A | . | . | . | . | . | −0.39 | 0.47 | . | . | . | −0.60 | 0.39 |
| Thr | 41 | A | A | . | . | . | . | . | −1.20 | 0.21 | . | * | . | −0.30 | 0.35 |
| Leu | 42 | A | A | . | . | . | . | . | −0.39 | 0.90 | . | . | . | −0.60 | 0.35 |
| Ala | 43 | A | A | . | . | . | . | . | −0.39 | 0.21 | . | . | . | −0.30 | 0.59 |
| Pro | 44 | A | A | . | . | . | . | . | −0.17 | −0.21 | * | . | . | 0.30 | 0.70 |
| Leu | 45 | A | A | . | . | . | . | . | −0.71 | −0.20 | * | . | . | 0.30 | 0.86 |
| Asp | 46 | A | A | . | . | . | . | . | −0.70 | −0.20 | * | . | . | 0.30 | 0.60 |
| Glu | 47 | A | A | . | . | . | . | . | −0.19 | −0.31 | * | . | . | 0.30 | 0.52 |
| Ala | 48 | A | . | . | B | . | . | . | 0.09 | −0.36 | * | * | . | 0.30 | 0.84 |
| Ile | 49 | . | . | B | B | . | . | . | −0.56 | −0.56 | * | . | F | 0.75 | 0.73 |
| Ser | 50 | . | . | B | B | . | . | . | −0.03 | 0.09 | * | . | F | −0.15 | 0.31 |
| Ser | 51 | . | . | B | B | . | . | . | −0.33 | 1.00 | . | . | F | −0.45 | 0.33 |
| Thr | 52 | . | . | B | B | . | . | . | −0.63 | 0.89 | . | . | F | −0.45 | 0.62 |
| Val | 53 | . | . | . | B | T | . | . | −0.26 | 0.59 | * | . | F | −0.05 | 0.62 |
| Trp | 54 | . | . | . | B | T | . | . | 0.63 | 0.63 | * | . | F | −0.05 | 0.72 |
| Ser | 55 | . | . | . | B | . | . | C | 0.33 | 0.24 | * | . | F | 0.05 | 0.83 |
| Ser | 56 | . | . | . | . | . | T | C | −0.18 | 0.37 | * | . | F | 0.60 | 1.11 |
| Pro | 57 | . | . | . | . | . | T | C | −0.46 | 0.41 | * | . | F | 0.15 | 0.87 |
| Asp | 58 | . | . | . | . | T | T | . | 0.10 | 0.00 | * | . | F | 1.25 | 0.65 |
| Met | 59 | . | . | B | . | . | T | . | 0.39 | 0.00 | . | . | . | 0.70 | 0.65 |
| Leu | 60 | . | . | B | . | . | . | . | 0.69 | 0.01 | . | . | . | 0.24 | 0.73 |
| Ala | 61 | . | . | B | . | . | . | . | 0.69 | −0.41 | . | . | . | 1.18 | 0.73 |
| Ser | 62 | . | . | B | . | . | T | . | 0.90 | −0.03 | . | . | F | 1.87 | 0.99 |
| Gln | 63 | . | . | . | . | T | T | . | 0.69 | −0.24 | . | . | F | 2.76 | 2.08 |
| Asp | 64 | . | . | . | . | T | T | . | 1.00 | −0.50 | . | . | F | 3.40 | 3.19 |
| Ser | 65 | . | . | . | . | . | T | C | 1.50 | −0.09 | * | . | F | 2.56 | 2.50 |
| Gln | 66 | . | . | . | . | . | . | C | 1.79 | 0.01 | . | . | F | 1.66 | 2.08 |
| Pro | 67 | . | . | . | . | T | . | . | 2.09 | 0.00 | . | . | F | 2.36 | 1.67 |
| Trp | 68 | . | . | . | . | . | . | C | 2.09 | 0.00 | . | . | F | 2.06 | 2.08 |
| Thr | 69 | . | . | . | . | . | T | C | 1.78 | −0.39 | . | . | F | 2.16 | 2.08 |
| Ser | 70 | . | . | . | . | . | T | C | 1.22 | −0.30 | . | . | F | 2.40 | 1.95 |
| Asp | 71 | . | . | B | . | . | T | . | 0.37 | −0.09 | . | . | F | 1.96 | 1.37 |
| Glu | 72 | . | . | B | . | . | T | . | −0.01 | −0.36 | . | . | F | 1.57 | 0.71 |
| Thr | 73 | . | . | B | . | . | . | . | −0.07 | −0.34 | . | . | F | 1.13 | 0.53 |
| Val | 74 | . | . | B | . | . | . | . | −0.10 | −0.30 | . | . | . | 0.74 | 0.32 |
| Val | 75 | . | . | B | . | . | T | . | −0.11 | 0.13 | . | . | . | 0.10 | 0.18 |
| Ala | 76 | A | . | . | . | . | T | . | −0.97 | 0.61 | . | . | . | −0.20 | 0.18 |
| Gly | 77 | A | . | . | . | . | T | . | −1.82 | 0.77 | . | . | F | −0.05 | 0.18 |
| Gly | 78 | A | . | . | . | . | T | . | −2.32 | 0.77 | * | * | F | −0.05 | 0.18 |
| Thr | 79 | A | . | . | B | . | . | . | −1.42 | 0.81 | * | * | F | −0.45 | 0.15 |
| Val | 80 | A | . | . | B | . | . | . | −1.23 | 0.31 | . | * | . | −0.30 | 0.30 |
| Val | 81 | . | . | B | B | . | . | . | −0.64 | 0.46 | . | * | . | −0.60 | 0.16 |
| Leu | 82 | . | . | B | B | . | . | . | −1.16 | 0.43 | * | * | . | −0.60 | 0.19 |
| Lys | 83 | . | . | B | B | . | . | . | −0.77 | 0.59 | * | * | . | −0.60 | 0.19 |
| Cys | 84 | . | . | B | B | . | . | . | −0.46 | −0.06 | . | * | . | 0.30 | 0.52 |
| Gln | 85 | A | . | . | B | . | . | . | 0.37 | −0.70 | . | * | . | 0.75 | 1.05 |
| Val | 86 | A | . | . | B | . | . | . | 1.22 | −0.89 | * | * | . | 0.60 | 0.72 |
| Lys | 87 | . | . | B | B | . | . | . | 2.03 | −0.89 | * | * | F | 1.24 | 2.32 |
| Asp | 88 | A | . | . | . | . | . | . | 1.69 | −1.46 | . | * | F | 1.78 | 2.24 |
| His | 89 | A | . | . | . | . | . | . | 2.06 | −1.47 | . | * | F | 2.12 | 4.04 |
| Glu | 90 | A | . | . | . | . | . | . | 1.24 | −1.73 | * | * | F | 2.46 | 2.71 |
| Asp | 91 | . | . | . | . | T | T | . | 2.10 | −1.04 | * | * | F | 3.40 | 1.34 |
| Ser | 92 | . | . | . | . | T | T | . | 1.77 | −0.64 | . | * | F | 3.06 | 1.70 |
| Ser | 93 | . | . | . | . | T | T | . | 1.47 | −0.23 | . | . | F | 2.42 | 1.03 |
| Leu | 94 | . | . | . | . | T | T | . | 1.50 | 0.16 | . | * | . | 1.18 | 0.83 |
| Gln | 95 | . | . | . | . | T | . | . | 1.29 | 0.56 | * | * | . | 0.34 | 0.99 |
| Trp | 96 | . | . | . | . | T | . | . | 0.70 | 0.60 | * | * | . | 0.15 | 1.15 |
| Ser | 97 | . | . | . | . | . | . | C | 1.00 | 0.71 | * | * | F | 0.10 | 1.41 |
| Asn | 98 | . | . | . | . | . | T | C | 1.30 | 0.43 | * | * | F | 0.30 | 1.41 |
| Pro | 99 | . | . | . | . | . | T | C | 1.80 | 0.43 | * | * | F | 0.30 | 2.31 |
| Ala | 100 | . | . | . | . | T | T | . | 0.99 | 0.00 | * | . | F | 1.40 | 2.49 |
| Gln | 101 | . | . | B | . | . | T | . | 1.03 | 0.30 | * | . | F | 0.40 | 1.28 |
| Gln | 102 | . | . | B | B | . | . | . | 0.63 | 0.66 | * | . | F | −0.30 | 1.30 |
| Thr | 103 | . | . | B | B | . | . | . | 0.29 | 1.01 | * | . | F | −0.30 | 1.11 |
| Leu | 104 | . | . | B | B | . | . | . | 0.50 | 0.94 | * | . | . | −0.60 | 0.63 |
| Tyr | 105 | . | . | B | . | . | . | . | 1.13 | 0.54 | * | . | . | −0.40 | 0.63 |
| Phe | 106 | . | A | B | . | . | . | . | 1.24 | 0.14 | * | . | . | −0.30 | 0.88 |
| Gly | 107 | A | A | . | . | . | . | . | 0.66 | −0.34 | * | . | F | 0.60 | 2.09 |
| Glu | 108 | A | A | . | . | . | . | . | 0.16 | −0.53 | * | . | F | 0.90 | 1.35 |
| Lys | 109 | A | A | . | . | . | . | . | 1.08 | −0.60 | * | . | F | 0.90 | 1.28 |
| Arg | 110 | A | A | . | . | . | . | . | 1.32 | −1.39 | * | . | F | 0.90 | 2.54 |
| Ala | 111 | A | A | . | . | . | . | . | 2.02 | −1.81 | * | . | F | 0.90 | 2.45 |
| Leu | 112 | A | A | . | . | . | . | . | 2.48 | −1.41 | * | . | F | 0.90 | 1.97 |
| Arg | 113 | A | . | . | . | . | T | . | 1.59 | −1.41 | * | * | F | 1.30 | 1.97 |
| Asp | 114 | A | . | . | . | . | T | . | 1.54 | −0.73 | * | * | F | 1.30 | 1.37 |
| Asn | 115 | A | . | . | . | . | T | . | 0.62 | −0.83 | * | * | F | 1.30 | 2.87 |
| Arg | 116 | . | . | B | . | . | T | . | 0.36 | −0.83 | . | * | F | 1.30 | 1.21 |
| Ile | 117 | . | . | B | B | . | . | . | 0.86 | −0.19 | . | * | . | 0.30 | 0.54 |
| Gln | 118 | . | . | B | B | . | . | . | 0.44 | 0.30 | . | * | . | −0.30 | 0.48 |
| Leu | 119 | . | . | B | B | . | . | . | 0.13 | 0.29 | . | * | . | −0.30 | 0.33 |
| Val | 120 | . | . | B | B | . | . | . | −0.08 | 0.77 | . | * | . | −0.36 | 0.68 |
| Thr | 121 | . | . | B | B | . | . | . | −0.22 | 0.51 | . | * | F | 0.03 | 0.61 |
| Ser | 122 | . | . | B | . | . | . | . | 0.67 | 0.61 | * | . | F | 0.47 | 1.00 |
| Thr | 123 | . | . | . | . | . | T | C | −0.14 | −0.07 | * | . | F | 2.16 | 2.33 |
| Pro | 124 | . | . | . | . | . | T | C | 0.37 | −0.03 | . | * | F | 2.40 | 1.33 |
| His | 125 | . | . | . | . | . | T | C | 0.33 | −0.13 | . | * | F | 2.16 | 1.33 |
| Glu | 126 | . | . | B | . | . | T | . | 0.34 | 0.17 | . | * | . | 0.82 | 0.65 |
| Leu | 127 | . | . | B | B | . | . | . | −0.24 | 0.07 | . | * | . | 0.18 | 0.56 |
| Ser | 128 | . | . | B | B | . | . | . | −0.23 | 0.33 | * | * | . | −0.06 | 0.29 |
| Ile | 129 | . | . | B | B | . | . | . | −0.02 | 0.21 | * | * | . | −0.30 | 0.22 |
| Ser | 130 | . | . | B | B | . | . | . | −0.84 | 0.61 | * | * | . | −0.60 | 0.44 |
| Ile | 131 | . | . | B | B | . | . | . | −1.43 | 0.57 | . | * | . | −0.60 | 0.24 |
| Ser | 132 | . | . | B | B | . | . | . | −1.43 | 0.69 | . | * | . | −0.60 | 0.35 |
| Asn | 133 | . | A | B | . | . | . | . | −1.72 | 0.69 | . | . | . | −0.60 | 0.21 |
| Val | 134 | . | A | B | . | . | . | . | −0.83 | 0.80 | . | . | . | −0.60 | 0.31 |
| Ala | 135 | . | A | B | . | . | . | . | −0.53 | 0.11 | . | . | . | −0.30 | 0.38 |
| Leu | 136 | A | A | . | . | . | . | . | 0.01 | −0.27 | . | . | . | 0.30 | 0.41 |
| Ala | 137 | A | A | . | . | . | . | . | 0.31 | −0.24 | . | . | . | 0.30 | 0.55 |
| Asp | 138 | A | A | . | . | . | . | . | 0.07 | −0.89 | . | . | F | 0.75 | 0.95 |
| Glu | 139 | A | A | . | . | . | . | . | 0.61 | −0.63 | . | . | F | 0.90 | 1.80 |
| Gly | 140 | A | . | . | . | . | . | . | 0.53 | −0.83 | * | . | F | 1.10 | 2.57 |
| Glu | 141 | A | . | . | . | . | . | . | 1.04 | −0.76 | * | * | F | 0.95 | 0.82 |
| Tyr | 142 | A | . | . | . | . | T | . | 0.74 | −0.37 | * | . | . | 0.70 | 0.64 |
| Thr | 143 | A | . | . | . | . | T | . | 0.04 | 0.31 | * | . | . | 0.10 | 0.45 |
| Cys | 144 | . | . | B | . | . | T | . | −0.27 | 0.67 | . | * | . | −0.20 | 0.23 |
| Ser | 145 | . | . | B | . | . | T | . | −0.52 | 1.16 | * | . | . | −0.20 | 0.21 |
| Ile | 146 | . | . | B | B | . | . | . | −0.73 | 1.01 | . | . | . | −0.60 | 0.14 |
| Phe | 147 | . | . | B | B | . | . | . | −1.34 | 0.96 | * | * | . | −0.60 | 0.41 |
| Thr | 148 | . | . | B | B | . | . | . | −0.92 | 1.03 | * | * | . | −0.60 | 0.23 |
| Met | 149 | . | . | B | B | . | . | . | −0.57 | 0.64 | * | * | . | −0.60 | 0.64 |
| Pro | 150 | . | . | B | B | . | . | . | −0.86 | 0.44 | * | . | . | −0.45 | 1.06 |
| Val | 151 | A | . | . | B | . | . | . | 0.08 | 0.16 | * | . | . | −0.30 | 0.74 |
| Arg | 152 | A | . | . | B | . | . | . | 0.48 | −0.33 | * | * | F | 0.60 | 1.50 |
| Thr | 153 | A | . | . | B | . | . | . | −0.02 | −0.56 | * | * | F | 0.90 | 1.30 |
| Ala | 154 | A | . | . | B | . | . | . | −0.28 | −0.30 | * | * | F | 0.60 | 1.45 |
| Lys | 155 | A | . | . | B | . | . | . | −0.38 | −0.30 | * | * | F | 0.45 | 0.55 |
| Ser | 156 | . | . | B | B | . | . | . | −0.38 | 0.19 | * | . | F | −0.15 | 0.55 |
| Leu | 157 | . | . | B | B | . | . | . | −1.30 | 0.34 | * | . | . | −0.30 | 0.40 |
| Val | 158 | . | . | B | B | . | . | . | −1.33 | 0.53 | * | . | . | −0.60 | 0.17 |
| Thr | 159 | . | . | B | B | . | . | . | −1.63 | 0.96 | * | . | . | −0.60 | 0.12 |
| Val | 160 | . | . | B | B | . | . | . | −1.89 | 1.26 | * | . | . | −0.60 | 0.10 |
| Leu | 161 | . | . | B | B | . | . | . | −1.59 | 1.00 | * | . | . | −0.60 | 0.22 |
| Gly | 162 | . | . | B | B | . | . | . | −0.73 | 0.76 | * | . | . | −0.60 | 0.26 |
| Ile | 163 | . | . | B | B | . | . | . | −0.09 | 0.27 | * | . | F | −0.15 | 0.70 |
| Pro | 164 | . | . | . | B | . | . | C | −0.67 | 0.06 | * | . | F | 0.20 | 1.32 |
| Gln | 165 | . | . | B | . | . | . | . | −0.70 | 0.06 | * | . | F | 0.05 | 0.93 |
| Lys | 166 | . | . | B | B | . | . | . | −0.20 | 0.31 | . | . | F | −0.15 | 0.93 |
| Pro | 167 | . | . | B | B | . | . | . | −0.20 | 0.11 | . | . | F | −0.15 | 0.87 |
| Ile | 168 | . | . | B | B | . | . | . | 0.44 | 0.11 | * | . | . | −0.30 | 0.50 |
| Ile | 169 | . | . | B | B | . | . | . | 0.70 | 0.47 | * | . | . | −0.60 | 0.39 |
| Thr | 170 | . | . | B | B | . | . | . | 0.40 | 0.47 | * | . | . | −0.60 | 0.50 |
| Gly | 171 | . | . | B | . | . | . | . | 0.06 | 0.43 | * | . | F | 0.05 | 0.96 |
| Tyr | 172 | . | . | B | . | . | T | . | −0.54 | 0.13 | * | * | F | 1.00 | 1.84 |
| Lys | 173 | . | . | . | . | . | T | C | 0.46 | 0.13 | * | * | F | 1.50 | 1.05 |
| Ser | 174 | . | . | . | . | . | T | C | 1.34 | −0.36 | * | * | F | 2.40 | 2.08 |
| Ser | 175 | . | . | . | . | . | T | C | 1.70 | −0.79 | * | * | F | 3.00 | 2.30 |
| Leu | 176 | . | A | B | . | . | . | . | 2.04 | −1.54 | * | * | F | 2.10 | 2.30 |
| Arg | 177 | A | A | . | . | . | . | . | 1.98 | −1.54 | * | * | F | 1.80 | 2.87 |
| Glu | 178 | A | A | . | . | . | . | . | 1.34 | −1.44 | * | * | F | 1.50 | 3.09 |
| Lys | 179 | A | A | . | . | . | . | . | 1.33 | −1.33 | . | * | F | 1.20 | 3.79 |
| Asp | 180 | A | A | . | . | . | . | . | 0.82 | −1.53 | . | * | F | 0.90 | 2.79 |
| Thr | 181 | A | A | . | . | . | . | . | 1.63 | −0.84 | . | * | F | 0.90 | 1.33 |
| Ala | 182 | A | A | . | . | . | . | . | 0.86 | −0.44 | . | * | F | 0.60 | 1.07 |
| Thr | 183 | . | A | B | . | . | . | . | 0.86 | 0.13 | . | * | . | −0.30 | 0.34 |
| Leu | 184 | . | A | B | . | . | . | . | 0.51 | 0.53 | . | * | . | −0.60 | 0.41 |
| Asn | 185 | . | A | B | . | . | . | . | 0.21 | 0.43 | . | * | . | −0.60 | 0.55 |
| Cys | 186 | . | . | B | . | . | . | . | 0.18 | 0.31 | . | * | F | 0.39 | 0.51 |
| Gln | 187 | . | . | . | . | T | . | . | 0.47 | 0.26 | . | * | F | 1.13 | 0.61 |
| Ser | 188 | . | . | . | . | T | T | . | 0.82 | −0.04 | . | * | F | 2.27 | 0.51 |
| Ser | 189 | . | . | . | . | T | T | . | 1.42 | −0.44 | * | * | F | 2.76 | 1.89 |
| Gly | 190 | . | . | . | . | T | T | . | 0.83 | −0.59 | * | . | F | 3.40 | 1.69 |
| Ser | 191 | . | . | . | . | . | T | C | 0.91 | −0.49 | * | * | F | 2.56 | 1.27 |
| Lys | 192 | . | A | . | . | . | . | C | 1.02 | −0.37 | * | * | F | 1.67 | 0.96 |
| Pro | 193 | . | A | . | . | . | . | C | 0.51 | −0.76 | * | * | F | 1.78 | 1.90 |
| Ala | 194 | . | A | B | . | . | . | . | 0.50 | −0.50 | * | * | F | 1.24 | 1.17 |
| Ala | 195 | . | A | B | B | . | . | . | 0.56 | −0.40 | * | * | . | 0.30 | 0.84 |
| Arg | 196 | . | A | B | B | . | . | . | 0.97 | 0.51 | * | * | . | −0.60 | 0.57 |
| Leu | 197 | . | A | B | B | . | . | . | 0.97 | 0.09 | * | * | . | 0.19 | 1.11 |
| Thr | 198 | A | A | . | B | . | . | . | 0.83 | −0.41 | * | * | . | 1.13 | 2.20 |
| Trp | 199 | A | A | . | B | . | . | . | 1.42 | −0.49 | * | * | . | 1.47 | 1.11 |
| Arg | 200 | . | . | . | . | . | T | C | 2.01 | −0.49 | * | * | F | 2.56 | 2.25 |
| Lys | 201 | . | . | . | . | T | T | . | 1.90 | −0.77 | * | * | F | 3.40 | 2.70 |
| Gly | 202 | . | . | . | . | T | T | . | 1.90 | −1.26 | * | * | F | 3.06 | 4.45 |
| Asp | 203 | . | . | . | . | . | T | C | 2.18 | −1.49 | * | * | F | 2.52 | 1.87 |
| Gln | 204 | . | A | . | . | . | . | C | 2.12 | −0.99 | * | * | F | 1.78 | 1.28 |
| Glu | 205 | . | A | . | . | . | . | C | 2.01 | −0.56 | * | * | F | 1.44 | 1.28 |
| Leu | 206 | . | A | . | . | . | . | C | 1.76 | −0.99 | * | * | F | 1.10 | 1.32 |
| His | 207 | . | A | . | . | T | . | . | 1.79 | −0.56 | * | * | F | 1.64 | 1.18 |
| Gly | 208 | . | A | . | . | . | . | C | 1.90 | −0.47 | * | * | F | 1.33 | 0.98 |
| Glu | 209 | . | . | . | . | . | T | C | 1.01 | −0.47 | * | * | F | 2.22 | 2.34 |
| Pro | 210 | . | . | . | . | . | T | C | 1.01 | −0.47 | * | * | F | 2.56 | 1.20 |
| Thr | 211 | . | . | . | . | T | T | . | 1.82 | −0.57 | * | * | F | 3.40 | 2.11 |
| Arg | 212 | . | . | B | . | . | T | . | 1.86 | −1.00 | * | * | F | 2.66 | 2.11 |
| Ile | 213 | . | . | B | . | . | . | . | 1.99 | −1.00 | * | * | F | 2.46 | 2.28 |
| Gln | 214 | . | . | B | . | . | . | . | 1.99 | −1.00 | * | * | F | 2.46 | 2.44 |
| Glu | 215 | . | . | B | . | . | . | . | 1.86 | −1.09 | * | * | F | 2.46 | 2.00 |
| Asp | 216 | . | . | . | . | . | T | C | 2.21 | −0.66 | * | * | F | 2.86 | 2.83 |
| Pro | 217 | . | . | . | . | T | T | . | 1.79 | −1.34 | . | * | F | 3.40 | 3.26 |
| Asn | 218 | . | . | . | . | T | T | . | 1.98 | −1.26 | . | * | F | 3.06 | 2.72 |
| Gly | 219 | . | . | . | . | T | T | . | 1.67 | −0.47 | . | * | F | 2.42 | 1.41 |
| Lys | 220 | . | . | . | B | T | . | . | 0.81 | 0.01 | . | . | F | 1.08 | 1.32 |
| Thr | 221 | . | . | B | B | . | . | . | 0.51 | 0.23 | . | . | F | 0.19 | 0.61 |
| Phe | 222 | . | . | B | B | . | . | . | 0.42 | 0.21 | . | . | F | −0.15 | 0.82 |
| Thr | 223 | . | . | B | B | . | . | . | 0.12 | 0.17 | . | * | . | −0.30 | 0.55 |
| Val | 224 | . | . | B | . | . | T | . | −0.39 | 0.56 | . | . | F | −0.05 | 0.51 |
| Ser | 225 | . | . | B | . | . | T | . | −0.74 | 0.71 | . | * | F | −0.05 | 0.44 |
| Ser | 226 | . | . | . | . | . | T | C | −1.13 | 0.41 | . | * | F | 0.15 | 0.44 |
| Ser | 227 | . | . | . | . | . | T | C | −0.43 | 0.71 | . | * | F | 0.15 | 0.51 |
| Val | 228 | . | . | B | B | . | . | . | −0.98 | 0.47 | . | * | F | −0.45 | 0.66 |
| Thr | 229 | . | . | B | B | . | . | . | −0.43 | 0.73 | * | * | . | −0.60 | 0.37 |
| Phe | 230 | . | . | B | B | . | . | . | −0.02 | 0.83 | * | * | . | −0.60 | 0.39 |
| Gln | 231 | . | . | B | B | . | . | . | 0.28 | 0.44 | * | * | . | −0.45 | 1.04 |
| Val | 232 | . | . | B | B | . | . | . | 0.58 | −0.20 | * | * | . | 0.79 | 1.25 |
| Thr | 233 | . | . | B | B | . | . | . | 1.43 | −0.69 | * | * | F | 1.58 | 2.41 |
| Arg | 234 | . | . | B | B | . | . | . | 1.40 | −1.47 | * | . | F | 1.92 | 2.32 |
| Glu | 235 | . | . | . | B | T | | . | 1.51 | −1.44 | * | . | F | 2.66 | 3.10 |
| Asp | 236 | . | . | . | . | T | T | . | 1.21 | −1.59 | . | . | F | 3.40 | 2.17 |
| Asp | 237 | . | . | . | . | T | T | . | 1.18 | −1.69 | * | . | F | 3.06 | 1.48 |
| Gly | 238 | . | . | . | . | T | T | . | 0.63 | −1.00 | . | . | F | 2.57 | 0.60 |
| Ala | 239 | A | . | . | . | . | T | . | −0.14 | −0.36 | . | . | . | 1.38 | 0.27 |
| Ser | 240 | . | . | B | B | . | . | . | −0.44 | 0.21 | * | . | . | 0.04 | 0.09 |
| Ile | 241 | . | . | B | B | . | . | . | −1.30 | 0.60 | * | . | . | −0.60 | 0.12 |
| Val | 242 | . | . | B | B | . | . | . | −1.30 | 0.81 | * | . | . | −0.60 | 0.09 |
| Cys | 243 | . | . | B | B | . | . | . | −0.99 | 0.71 | * | * | . | −0.60 | 0.10 |
| Ser | 244 | . | . | B | B | . | . | . | −0.40 | 0.83 | . | * | . | −0.60 | 0.20 |
| Val | 245 | . | . | B | B | . | . | . | −0.40 | 0.14 | . | . | . | −0.30 | 0.46 |
| Asn | 246 | A | . | . | B | . | . | . | −0.32 | −0.11 | * | . | . | 0.45 | 1.16 |
| His | 247 | A | A | . | . | . | . | . | 0.58 | 0.00 | * | . | . | 0.30 | 0.71 |
| Glu | 248 | A | A | . | . | . | . | . | 0.90 | −0.39 | * | . | F | 0.60 | 1.92 |
| Ser | 249 | A | A | . | . | . | . | . | 0.61 | −0.60 | * | . | F | 0.90 | 1.18 |
| Leu | 250 | A | A | . | . | . | . | . | 1.47 | −0.50 | * | * | F | 0.75 | 0.88 |
| Lys | 251 | A | A | . | . | . | . | . | 1.58 | −1.00 | * | * | F | 0.75 | 0.85 |
| Gly | 252 | A | . | . | . | . | T | . | 1.31 | −1.00 | * | * | F | 1.60 | 1.24 |
| Ala | 253 | A | . | . | . | . | T | . | 1.00 | −1.00 | * | * | F | 1.90 | 2.01 |
| Asp | 254 | A | . | . | . | . | T | . | 1.00 | −1.20 | * | * | F | 2.20 | 1.45 |
| Arg | 255 | A | . | . | . | . | T | . | 1.81 | −0.81 | * | * | F | 2.50 | 1.96 |
| Ser | 256 | . | . | . | . | . | T | C | 1.88 | −0.84 | * | * | F | 3.00 | 3.37 |
| Thr | 257 | . | . | . | . | . | T | C | 1.33 | −1.34 | * | * | F | 2.70 | 3.95 |
| Ser | 258 | . | . | . | . | . | T | C | 1.92 | −0.66 | * | * | F | 2.40 | 1.41 |
| Gln | 259 | . | . | B | . | . | T | . | 1.07 | −0.66 | * | * | F | 1.90 | 1.83 |
| Arg | 260 | . | . | B | B | . | . | . | 0.14 | −0.40 | * | * | F | 0.75 | 0.94 |
| Ile | 261 | . | . | B | B | . | . | . | 0.20 | −0.20 | * | * | F | 0.45 | 0.58 |
| Glu | 262 | . | . | B | B | . | . | . | 0.20 | 0.17 | . | * | . | −0.30 | 0.52 |
| Val | 263 | . | . | B | B | . | . | . | 0.29 | 0.26 | . | * | . | −0.30 | 0.39 |
| Leu | 264 | . | . | B | B | . | . | . | −0.02 | 0.69 | * | * | . | −0.60 | 0.85 |
| Tyr | 265 | . | . | B | B | . | . | . | −0.72 | 0.49 | . | * | . | −0.60 | 0.71 |
| Thr | 266 | . | . | B | . | . | T | . | −0.43 | 0.99 | * | * | . | −0.20 | 0.96 |
| Pro | 267 | . | . | . | . | . | T | C | −1.32 | 0.96 | * | * | F | 0.30 | 1.16 |
| Thr | 268 | . | . | B | . | . | T | . | −0.36 | 0.96 | * | * | . | −0.20 | 0.52 |
| Ala | 269 | . | . | B | . | . | T | . | 0.24 | 0.20 | . | * | . | 0.10 | 0.70 |
| Met | 270 | . | . | B | . | . | . | . | 0.49 | 0.14 | . | * | . | −0.10 | 0.70 |
| Ile | 271 | . | . | B | . | . | . | . | 0.59 | −0.29 | . | * | . | 0.50 | 0.81 |
| Arg | 272 | . | . | B | . | . | T | . | 0.59 | −0.34 | . | * | . | 0.85 | 1.24 |
| Pro | 273 | . | . | . | . | T | T | . | 0.87 | −0.41 | . | * | F | 1.40 | 1.94 |
| Asp | 274 | . | . | . | . | . | T | C | 1.24 | −0.53 | * | * | F | 1.50 | 3.77 |
| Pro | 275 | . | . | . | . | . | T | C | 1.96 | −0.79 | * | * | F | 1.84 | 2.98 |
| Pro | 276 | . | . | . | . | . | . | C | 2.84 | −0.79 | * | * | F | 1.98 | 3.77 |
| His | 277 | . | . | . | . | . | T | C | 2.39 | −1.21 | * | . | F | 2.52 | 3.91 |
| Pro | 278 | . | . | . | . | . | T | C | 2.60 | −0.79 | * | . | F | 2.86 | 2.50 |
| Arg | 279 | . | . | . | . | T | T | . | 2.64 | −0.81 | * | * | F | 3.40 | 2.80 |
| Glu | 280 | A | . | . | . | . | T | . | 2.04 | −1.24 | * | . | F | 2.66 | 4.12 |
| Gly | 281 | A | A | . | . | . | . | . | 1.44 | −1.06 | * | * | F | 1.92 | 2.20 |
| Gln | 282 | A | A | . | . | . | . | . | 0.67 | −0.80 | * | * | F | 1.43 | 0.93 |
| Lys | 283 | A | A | . | . | . | . | . | 0.84 | −0.11 | * | * | F | 0.79 | 0.44 |
| Leu | 284 | A | A | . | . | . | . | . | 0.07 | 0.39 | * | * | F | −0.15 | 0.61 |
| Leu | 285 | . | A | B | . | . | . | . | 0.07 | 0.53 | * | * | . | −0.60 | 0.19 |
| Leu | 286 | . | A | B | . | . | . | . | 0.07 | 0.13 | * | * | . | −0.30 | 0.16 |
| His | 287 | . | A | B | . | . | . | . | 0.18 | 0.56 | * | * | . | −0.26 | 0.19 |
| Cys | 288 | . | A | B | . | . | . | . | −0.21 | −0.13 | * | * | . | 0.98 | 0.46 |
| Glu | 289 | . | A | . | . | T | . | . | 0.60 | −0.39 | . | * | F | 1.87 | 0.56 |
| Gly | 290 | . | . | . | . | T | T | . | 1.20 | −0.67 | . | * | F | 2.91 | 0.66 |
| Arg | 291 | . | . | . | . | T | T | . | 1.16 | −0.74 | . | * | F | 3.40 | 1.89 |
| Gly | 292 | . | . | . | . | T | T | . | 0.98 | −0.67 | . | * | F | 2.91 | 0.81 |
| Asn | 293 | . | . | . | . | . | T | C | 1.64 | −0.24 | . | * | F | 2.22 | 1.27 |
| Pro | 294 | . | . | . | . | . | . | C | 1.64 | −0.27 | . | * | F | 1.68 | 1.12 |
| Val | 295 | . | . | . | . | . | . | C | 1.74 | 0.13 | * | * | F | 0.74 | 1.96 |
| Pro | 296 | . | . | B | . | . | . | . | 0.82 | 0.46 | * | * | F | −0.10 | 1.91 |
| Gln | 297 | . | A | B | . | . | . | . | 0.88 | 0.74 | . | . | F | −0.30 | 1.02 |
| Gln | 298 | . | A | B | . | . | . | . | 0.88 | 1.23 | . | . | F | −0.30 | 1.44 |
| Tyr | 299 | . | A | B | . | . | . | . | 1.13 | 0.59 | . | . | . | −0.45 | 1.62 |
| Leu | 300 | . | A | B | . | . | . | . | 1.99 | 0.16 | . | . | . | −0.15 | 1.87 |
| Trp | 301 | . | A | B | . | . | . | . | 1.86 | −0.24 | . | . | . | 0.45 | 1.87 |
| Glu | 302 | . | A | B | . | . | . | . | 1.56 | −0.21 | . | . | F | 0.60 | 1.18 |
| Lys | 303 | . | A | . | . | T | . | . | 0.70 | −0.59 | . | . | F | 1.30 | 1.92 |
| Glu | 304 | . | A | . | . | T | . | . | 0.73 | −0.63 | . | . | F | 1.30 | 1.35 |
| Gly | 305 | . | A | . | . | T | . | . | 1.33 | −1.11 | . | . | F | 1.30 | 1.21 |
| Ser | 306 | . | . | . | . | . | . | C | 0.81 | −0.69 | . | . | F | 1.15 | 0.93 |
| Val | 307 | . | . | . | . | . | . | C | 0.86 | 0.00 | . | . | F | 0.85 | 0.44 |
| Pro | 308 | . | . | . | . | . | T | C | 0.21 | 0.00 | . | . | F | 1.05 | 0.90 |
| Pro | 309 | A | . | . | . | . | T | C | −0.10 | 0.19 | . | . | F | 0.45 | 0.66 |
| Leu | 310 | A | . | . | . | . | T | . | 0.24 | 0.29 | . | . | F | 0.40 | 1.29 |
| Lys | 311 | A | . | . | . | . | T | . | 0.54 | 0.04 | . | . | F | 0.40 | 1.45 |
| Met | 312 | A | A | . | . | . | . | . | 1.10 | −0.39 | * | . | F | 0.60 | 1.62 |
| Thr | 313 | A | A | . | . | . | . | . | 0.72 | −0.43 | . | * | F | 0.60 | 2.63 |
| Gln | 314 | A | A | . | . | . | . | . | 0.12 | −0.61 | . | * | F | 0.90 | 1.33 |
| Glu | 315 | A | A | . | . | . | . | . | 0.04 | 0.07 | * | * | F | 0.00 | 1.11 |
| Ser | 316 | A | A | . | B | . | . | . | −0.70 | 0.14 | * | . | F | −0.15 | 0.54 |
| Ala | 317 | A | A | . | B | . | . | . | −0.31 | 0.44 | . | . | . | −0.60 | 0.27 |
| Leu | 318 | A | A | . | B | . | . | . | −0.70 | 0.47 | . | . | . | −0.60 | 0.24 |
| Ile | 319 | . | A | B | B | . | . | . | −1.51 | 1.26 | . | . | . | −0.60 | 0.16 |
| Phe | 320 | . | A | B | B | . | . | . | −1.51 | 1.56 | * | . | . | −0.60 | 0.13 |
| Pro | 321 | . | A | B | . | . | . | . | −1.17 | 1.46 | * | . | . | −0.60 | 0.25 |
| Phe | 322 | . | . | B | . | . | . | . | −0.88 | 0.77 | * | . | . | −0.40 | 0.70 |
| Leu | 323 | . | . | B | . | . | . | . | −0.07 | 0.47 | * | . | . | 0.09 | 1.09 |
| Asn | 324 | . | . | . | . | T | . | . | 0.52 | −0.31 | * | . | F | 1.88 | 1.18 |
| Lys | 325 | . | . | . | . | T | . | . | 0.88 | −0.36 | . | . | F | 2.22 | 1.82 |
| Ser | 326 | . | . | . | . | T | . | . | 0.78 | −0.71 | * | . | F | 2.86 | 2.19 |
| Asp | 327 | . | . | . | . | T | T | . | 1.23 | −0.91 | . | . | F | 3.40 | 1.96 |
| Ser | 328 | . | . | . | . | T | T | . | 1.70 | −0.56 | . | . | F | 3.06 | 1.54 |
| Gly | 329 | . | . | . | . | T | T | . | 1.03 | −0.13 | . | . | F | 2.42 | 1.14 |
| Thr | 330 | . | . | . | . | T | T | . | 0.68 | 0.06 | . | . | F | 1.33 | 0.36 |
| Tyr | 331 | . | . | B | B | . | . | . | 0.39 | 0.54 | . | . | F | −0.11 | 0.39 |
| Gly | 332 | . | . | B | B | . | . | . | 0.08 | 0.66 | . | . | . | −0.60 | 0.40 |
| Cys | 333 | . | . | B | B | . | . | . | 0.08 | 0.71 | . | . | . | −0.60 | 0.40 |
| Thr | 334 | . | . | B | B | . | . | . | 0.42 | 0.61 | . | . | . | −0.60 | 0.34 |
| Ala | 335 | . | . | B | B | . | . | . | 0.13 | 0.26 | . | . | F | −0.15 | 0.56 |
| Thr | 336 | . | . | B | B | . | . | . | 0.03 | 0.44 | . | . | F | −0.30 | 1.03 |
| Ser | 337 | . | . | B | B | . | . | . | 0.08 | 0.30 | . | . | F | −0.06 | 0.71 |
| Asn | 338 | . | . | B | . | T | T | . | 0.50 | 0.20 | . | . | F | 0.83 | 0.94 |
| Met | 339 | . | . | . | . | T | T | . | 0.86 | 0.46 | . | . | F | 0.77 | 1.02 |
| Gly | 340 | . | . | . | . | T | T | . | 0.86 | −0.03 | . | . | F | 1.76 | 1.52 |
| Ser | 341 | . | . | . | . | . | T | C | 0.92 | 0.09 | . | . | F | 0.90 | 0.95 |
| Tyr | 342 | . | . | B | B | . | . | . | 0.98 | 0.44 | . | . | . | −0.09 | 1.51 |
| Lys | 343 | . | . | B | B | . | . | . | 0.67 | 0.59 | . | * | . | −0.18 | 2.39 |
| Ala | 344 | . | . | B | B | . | . | . | 0.46 | 0.64 | . | * | . | −0.27 | 2.57 |
| Tyr | 345 | . | . | B | B | . | . | . | 0.80 | 0.94 | . | * | . | −0.36 | 1.35 |
| Tyr | 346 | . | . | B | B | . | . | . | 0.24 | 0.59 | . | * | . | −0.45 | 1.09 |
| Thr | 347 | . | . | B | B | . | . | . | 0.49 | 1.23 | . | * | . | −0.60 | 0.80 |
| Leu | 348 | . | . | B | B | . | . | . | 0.44 | 1.13 | . | * | . | −0.36 | 0.82 |
| Asn | 349 | . | . | B | B | . | . | . | 0.82 | 0.37 | . | * | . | 0.18 | 0.87 |
| Val | 350 | . | . | B | B | . | . | . | 0.77 | 0.04 | . | * | . | 0.42 | 0.94 |
| Asn | 351 | . | . | . | B | T | . | . | 0.80 | −0.06 | . | * | F | 1.96 | 1.52 |
| Asp | 352 | . | . | . | . | . | T | C | 0.26 | −0.31 | . | * | F | 2.40 | 1.46 |
| Pro | 353 | . | . | B | . | . | T | . | 0.86 | −0.07 | . | * | F | 1.96 | 1.46 |
| Ser | 354 | . | . | . | . | . | T | C | 0.56 | −0.29 | . | . | F | 1.92 | 1.41 |
| Pro | 355 | . | . | B | . | . | T | . | 1.11 | −0.30 | . | . | F | 1.48 | 1.13 |
| Val | 356 | . | . | B | . | . | T | . | 0.81 | 0.09 | . | . | F | 0.49 | 0.98 |
| Pro | 357 | . | . | B | . | . | T | . | 0.51 | 0.04 | . | . | F | 0.25 | 0.98 |
| Ser | 358 | . | . | . | . | T | T | . | 0.41 | 0.04 | . | . | F | 0.65 | 0.85 |
| Ser | 359 | . | . | B | . | . | T | . | 0.47 | 0.10 | . | . | F | 0.40 | 1.65 |
| Ser | 360 | . | . | B | . | . | T | . | 0.64 | 0.21 | . | . | F | 0.40 | 1.67 |
| Ser | 361 | . | . | B | . | . | T | . | 0.91 | 0.29 | . | . | F | 0.40 | 1.70 |
| Thr | 362 | . | . | B | . | . | T | . | 0.23 | 0.40 | . | . | F | 0.40 | 1.28 |
| Tyr | 363 | . | . | B | . | . | T | . | −0.36 | 0.70 | . | . | . | −0.20 | 0.67 |
| His | 364 | . | . | B | B | . | . | . | −0.40 | 1.00 | . | . | . | −0.60 | 0.35 |
| Ala | 365 | . | . | B | B | . | . | . | −0.44 | 1.04 | * | . | . | −0.60 | 0.24 |
| Ile | 366 | . | . | B | B | . | . | . | −1.03 | 0.99 | * | . | . | −0.60 | 0.15 |
| Ile | 367 | . | . | B | B | . | . | . | −1.58 | 0.91 | . | . | . | −0.60 | 0.08 |
| Gly | 368 | . | . | B | B | . | . | . | −1.92 | 1.06 | * | . | . | −0.60 | 0.06 |
| Gly | 369 | . | . | B | B | . | . | . | −2.59 | 1.06 | * | . | . | −0.60 | 0.08 |
| Ile | 370 | . | . | B | B | . | . | . | −2.89 | 1.16 | . | . | . | −0.60 | 0.10 |
| Val | 371 | . | . | B | B | . | . | . | −2.86 | 1.16 | . | . | . | −0.60 | 0.07 |
| Ala | 372 | . | . | B | B | . | . | . | −2.67 | 1.37 | . | . | . | −0.60 | 0.05 |
| Phe | 373 | . | . | B | B | . | . | . | −3.13 | 1.73 | . | . | . | −0.60 | 0.07 |
| Ile | 374 | . | . | B | B | . | . | . | −3.60 | 1.73 | . | . | . | −0.60 | 0.07 |
| Val | 375 | . | . | B | B | . | . | . | −3.52 | 1.77 | . | . | . | −0.60 | 0.06 |
| Phe | 376 | A | . | . | B | . | . | . | −3.56 | 1.96 | . | . | . | −0.60 | 0.06 |
| Leu | 377 | A | . | . | B | . | . | . | −3.57 | 1.86 | . | . | . | −0.60 | 0.06 |
| Leu | 378 | A | . | . | B | . | . | . | −3.68 | 1.79 | . | . | . | −0.60 | 0.08 |
| Leu | 379 | A | . | . | B | . | . | . | −3.68 | 1.83 | . | . | . | −0.60 | 0.07 |
| Ile | 380 | A | . | . | B | . | . | . | −3.52 | 1.73 | . | . | . | −0.60 | 0.06 |
| Met | 381 | A | . | . | B | . | . | . | −3.63 | 1.83 | . | . | . | −0.60 | 0.07 |
| Leu | 382 | A | . | . | B | . | . | . | −3.17 | 1.83 | . | . | . | −0.60 | 0.07 |
| Ile | 383 | A | . | . | B | . | . | . | −2.39 | 1.57 | . | . | . | −0.60 | 0.09 |
| Phe | 384 | A | . | . | B | . | . | . | −1.82 | 1.39 | . | . | . | −0.60 | 0.13 |
| Leu | 385 | A | . | . | B | . | . | . | −1.74 | 1.53 | . | . | . | −0.60 | 0.24 |
| Gly | 386 | A | . | . | B | . | . | . | −2.03 | 1.53 | * | * | . | −0.60 | 0.28 |
| His | 387 | A | . | . | B | . | . | . | −1.11 | 1.53 | * | * | . | −0.60 | 0.23 |
| Tyr | 388 | A | . | . | B | . | . | . | −0.26 | 0.74 | . | * | . | −0.60 | 0.55 |
| Leu | 389 | . | . | B | B | . | . | . | 0.49 | 0.56 | . | * | . | −0.32 | 0.75 |
| Ile | 390 | . | . | B | B | . | . | . | 0.96 | 0.13 | * | * | . | 0.41 | 1.11 |
| Arg | 391 | . | . | B | B | . | . | . | 0.99 | 0.06 | * | * | . | 0.54 | 0.70 |
| His | 392 | . | . | . | . | T | T | . | 0.78 | −0.21 | * | * | . | 2.37 | 1.22 |
| Lys | 393 | . | . | . | . | T | T | . | 0.21 | −0.14 | * | * | F | 2.80 | 2.73 |
| Gly | 394 | . | . | . | . | . | T | C | 0.71 | −0.14 | * | * | F | 2.32 | 1.15 |
| Thr | 395 | . | . | . | . | . | T | C | 1.57 | 0.34 | * | * | F | 1.44 | 1.22 |
| Tyr | 396 | . | . | B | . | . | . | . | 1.46 | 0.34 | . | * | . | 0.46 | 0.83 |
| Leu | 397 | . | A | B | . | . | . | . | 0.90 | 0.34 | * | * | . | 0.13 | 1.45 |
| Thr | 398 | . | A | B | . | . | . | . | 0.90 | 0.41 | . | * | . | −0.45 | 1.02 |
| His | 399 | A | A | . | . | . | . | . | 0.90 | −0.07 | * | * | . | 0.79 | 1.30 |
| Glu | 400 | A | A | . | . | . | . | . | 0.91 | −0.40 | * | * | . | 1.13 | 1.56 |
| Ala | 401 | A | A | . | . | . | . | . | 1.16 | −0.70 | * | * | F | 1.92 | 1.45 |
| Lys | 402 | . | A | . | . | T | . | . | 1.97 | −1.19 | * | * | F | 2.66 | 1.78 |
| Gly | 403 | . | . | . | . | T | T | . | 1.69 | −1.69 | * | * | F | 3.40 | 1.71 |
| Ser | 404 | . | . | . | . | . | T | C | 1.51 | −1.19 | * | * | F | 2.86 | 1.71 |
| Asp | 405 | . | . | . | . | T | T | . | 1.51 | −1.26 | * | * | F | 2.72 | 1.32 |
| Asp | 406 | A | . | . | . | . | T | C | 1.51 | −1.26 | * | * | F | 2.18 | 2.23 |
| Ala | 407 | A | . | . | . | . | . | . | 1.47 | −1.19 | * | . | F | 1.44 | 1.68 |
| Pro | 408 | A | . | . | . | . | . | . | 1.50 | −1.57 | . | . | F | 1.10 | 1.68 |
| Asp | 409 | A | . | . | . | . | T | . | 1.21 | −1.09 | * | . | F | 1.30 | 1.46 |
| Ala | 410 | A | . | . | . | . | T | . | 0.32 | −0.59 | * | . | F | 1.30 | 1.46 |
| Asp | 411 | A | . | . | . | . | T | . | −0.57 | −0.40 | * | . | F | 0.85 | 0.66 |
| Thr | 412 | A | . | . | . | . | T | . | 0.02 | −0.14 | * | . | F | 0.85 | 0.28 |
| Ala | 413 | A | . | . | B | . | . | . | −0.36 | 0.26 | . | * | . | −0.30 | 0.44 |
| Ile | 414 | . | . | B | B | . | . | . | −0.36 | 0.26 | . | * | . | −0.30 | 0.27 |
| Ile | 415 | . | . | B | B | . | . | . | −0.11 | 0.26 | . | . | . | −0.30 | 0.32 |
| Asn | 416 | . | . | B | . | . | T | . | −0.46 | 0.20 | . | . | . | 0.10 | 0.31 |
| Ala | 417 | . | . | B | . | . | T | . | −0.14 | 0.13 | . | . | F | 0.25 | 0.44 |
| Glu | 418 | . | . | . | . | T | T | . | 0.14 | −0.16 | . | . | F | 1.40 | 1.09 |
| Gly | 419 | . | . | . | . | T | T | . | 0.69 | −0.46 | . | . | F | 1.55 | 0.91 |
| Gly | 420 | . | . | . | . | T | . | . | 1.23 | −0.43 | . | * | F | 1.65 | 0.89 |
| Gln | 421 | . | . | . | . | . | T | C | 1.23 | −0.50 | * | . | F | 2.25 | 0.51 |
| Ser | 422 | . | . | . | . | . | T | C | 1.82 | −0.50 | . | . | F | 2.55 | 0.86 |
| Gly | 423 | . | . | . | . | . | T | C | 1.87 | −0.93 | * | . | F | 3.00 | 1.45 |
| Gly | 424 | . | . | . | . | . | T | C | 2.26 | −1.36 | * | . | F | 2.70 | 1.68 |
| Asp | 425 | . | . | . | . | . | T | C | 2.60 | −1.76 | * | . | F | 2.58 | 2.50 |
| Asp | 426 | . | . | . | . | . | T | C | 2.36 | −2.14 | * | . | F | 2.46 | 4.38 |
| Lys | 427 | A | . | . | . | . | T | . | 1.96 | −1.81 | . | . | F | 2.14 | 6.94 |
| Lys | 428 | A | . | . | . | . | T | . | 1.41 | −1.46 | . | . | F | 2.02 | 3.60 |
| Glu | 429 | . | . | B | B | . | . | . | 1.37 | −0.77 | . | . | F | 1.80 | 1.51 |
| Tyr | 430 | . | . | B | B | . | . | . | 0.98 | −0.34 | . | . | . | 1.02 | 0.97 |
| Phe | 431 | . | . | B | B | . | . | . | 0.59 | 0.09 | . | . | . | 0.24 | 0.62 |
| Ile | 432 | A | . | . | B | . | . | . | 0.16 | 0.51 | . | . | . | −0.24 | 0.46 |

[2739] TABLE 5
(Gene No: 62/Clone ID HEMAE80)

| Res | Position | I | II | III | IV | V | VI | VII | VIII | IX | X | XI | XII | XIII | XIV |
|---|---|---|---|---|---|---|---|---|---|---|---|---|---|---|---|
| Met | 1 | . | . | B | . | . | . | . | 0.59 | −0.19 | . | * | . | 0.86 | 1.62 |
| Arg | 2 | . | . | B | . | . | . | . | 0.77 | −0.19 | . | * | . | 1.07 | 1.25 |
| Thr | 3 | . | . | . | . | . | T | C | 0.34 | −0.19 | . | * | . | 1.68 | 1.52 |
| Pro | 4 | . | . | . | . | . | T | C | 0.52 | 0.07 | . | * | . | 1.29 | 1.26 |
| Gly | 5 | . | . | . | . | . | T | C | 0.06 | −0.11 | . | * | F | 2.10 | 1.00 |
| Pro | 6 | . | . | . | . | . | T | C | −0.16 | 0.53 | . | * | F | 0.99 | 0.51 |
| Leu | 7 | . | A | B | . | . | . | . | −1.08 | 0.73 | . | * | F | 0.18 | 0.27 |
| Pro | 8 | . | A | B | . | . | . | . | −1.58 | 0.99 | . | . | . | −0.18 | 0.23 |
| Val | 9 | . | A | B | . | . | . | . | −2.18 | 1.24 | . | . | . | −0.39 | 0.12 |
| Leu | 10 | . | A | B | . | . | . | . | −2.64 | 1.50 | . | . | . | −0.60 | 0.12 |
| Leu | 11 | . | A | B | . | . | . | . | −3.02 | 1.50 | . | . | . | −0.60 | 0.06 |
| Leu | 12 | . | A | B | . | . | . | . | −2.56 | 1.57 | . | . | . | −0.60 | 0.09 |
| Leu | 13 | . | A | B | . | . | . | . | −2.93 | 1.36 | . | . | . | −0.60 | 0.11 |
| Leu | 14 | . | A | B | . | . | . | . | −2.29 | 1.17 | . | . | . | −0.60 | 0.13 |
| Ala | 15 | . | A | B | . | . | . | . | −2.07 | 0.91 | . | . | . | −0.60 | 0.24 |
| Gly | 16 | . | A | B | . | . | . | . | −1.84 | 0.73 | . | . | . | −0.60 | 0.30 |
| Ala | 17 | . | . | B | . | . | . | . | −0.92 | 0.54 | . | . | . | −0.40 | 0.37 |
| Pro | 18 | . | . | B | . | . | . | . | −0.32 | −0.14 | . | . | . | 0.74 | 0.71 |
| Ala | 19 | . | . | . | . | T | . | . | 0.18 | −0.21 | . | . | . | 1.53 | 1.11 |
| Ala | 20 | . | . | B | . | . | . | . | 0.56 | −0.16 | . | . | . | 1.37 | 1.58 |
| Arg | 21 | . | . | B | . | . | . | . | 0.69 | −0.23 | . | . | F | 1.76 | 1.58 |
| Pro | 22 | . | . | . | . | T | . | . | 0.97 | −0.23 | . | . | F | 2.40 | 2.42 |
| Thr | 23 | . | . | . | . | . | . | C | 0.51 | −0.24 | . | . | F | 1.96 | 3.46 |
| Pro | 24 | . | . | . | . | . | T | C | 0.86 | −0.17 | . | . | F | 1.77 | 0.95 |
| Pro | 25 | . | . | . | . | T | T | . | 1.14 | 0.59 | . | * | F | 0.93 | 0.96 |
| Thr | 26 | . | . | . | . | T | T | . | 1.14 | 0.54 | . | * | F | 0.59 | 0.89 |
| Cys | 27 | . | . | B | . | . | T | . | 0.76 | 0.06 | . | * | . | 0.25 | 1.13 |
| Tyr | 28 | . | . | B | . | . | . | . | 1.18 | 0.24 | . | * | . | −0.10 | 0.72 |
| Ser | 29 | . | A | B | . | . | . | . | 0.80 | −0.19 | . | * | . | 0.30 | 0.98 |
| Arg | 30 | . | A | B | . | . | . | . | 0.20 | −0.17 | . | * | . | 0.45 | 1.85 |
| Met | 31 | . | A | B | . | . | . | . | 0.21 | −0.06 | . | * | . | 0.30 | 0.97 |
| Arg | 32 | . | A | B | . | . | . | . | 0.88 | −0.43 | . | * | . | 0.30 | 0.97 |
| Ala | 33 | . | A | B | . | . | . | . | 1.12 | −0.41 | * | * | . | 0.30 | 0.86 |
| Leu | 34 | . | A | . | . | . | . | C | 0.53 | −0.41 | * | * | . | 0.65 | 1.50 |
| Ser | 35 | . | A | B | . | . | . | . | 0.11 | −0.34 | * | * | F | 0.45 | 0.54 |
| Gln | 36 | . | A | B | . | . | . | . | 0.82 | 0.14 | * | . | F | −0.15 | 0.77 |
| Glu | 37 | . | A | B | . | . | . | . | 0.71 | −0.36 | * | . | F | 0.60 | 1.83 |
| Ile | 38 | . | A | B | . | . | . | . | 0.60 | −1.04 | * | . | F | 0.90 | 2.28 |
| Thr | 39 | . | A | B | . | . | . | . | 1.41 | −0.64 | * | * | F | 0.90 | 1.14 |
| Arg | 40 | . | A | B | . | . | . | . | 0.90 | −0.64 | * | . | F | 0.90 | 1.06 |
| Asp | 41 | . | A | . | . | T | . | . | 0.09 | 0.04 | * | . | F | 0.40 | 1.24 |
| Phe | 42 | . | . | B | B | . | . | . | 0.09 | 0.04 | * | . | . | −0.30 | 0.71 |
| Asn | 43 | . | . | B | B | . | . | . | 0.12 | −0.04 | * | . | . | 0.30 | 0.63 |
| Leu | 44 | . | . | . | B | . | . | C | 0.13 | 0.60 | . | . | . | −0.40 | 0.28 |
| Leu | 45 | . | . | B | B | . | . | . | 0.02 | 0.99 | . | . | . | −0.60 | 0.43 |
| Gln | 46 | . | . | B | B | . | . | . | −0.19 | 0.20 | . | . | . | 0.04 | 0.47 |
| Val | 47 | . | . | . | B | . | . | C | 0.21 | 0.23 | . | . | . | 0.58 | 0.87 |
| Ser | 48 | . | . | . | B | . | . | C | 0.21 | −0.07 | . | . | F | 1.82 | 1.42 |
| Glu | 49 | . | . | . | . | . | T | C | 0.81 | −0.76 | . | . | F | 2.86 | 1.42 |
| Pro | 50 | . | . | . | . | T | T | . | 0.96 | −0.73 | . | . | F | 3.40 | 2.95 |
| Ser | 51 | . | . | . | . | T | T | . | 0.10 | −0.80 | * | * | F | 3.06 | 1.18 |
| Glu | 52 | . | . | . | . | . | T | C | 1.07 | −0.54 | * | * | F | 2.37 | 0.51 |
| Pro | 53 | . | . | . | B | T | . | . | 1.12 | −0.54 | * | . | F | 1.83 | 0.64 |
| Cys | 54 | . | . | B | B | . | . | . | 0.31 | −0.21 | * | . | . | 0.64 | 0.75 |
| Val | 55 | . | . | B | B | . | . | . | 0.31 | 0.09 | * | * | . | −0.30 | 0.36 |
| Arg | 56 | . | . | B | B | . | . | . | 0.72 | 0.51 | * | * | . | −0.60 | 0.36 |
| Tyr | 57 | . | . | B | B | . | . | . | −0.09 | 0.09 | * | * | . | −0.15 | 1.30 |
| Leu | 58 | . | . | B | B | . | . | . | −0.12 | 0.20 | * | * | . | −0.15 | 1.45 |
| Pro | 59 | . | . | B | B | . | . | . | −0.27 | 0.31 | * | * | . | −0.15 | 1.16 |
| Arg | 60 | . | . | B | B | . | . | . | 0.59 | 1.00 | * | * | . | −0.60 | 0.61 |
| Leu | 61 | . | . | B | B | . | . | . | −0.41 | 0.24 | * | * | . | −0.15 | 1.24 |
| Tyr | 62 | . | . | B | B | . | . | . | −0.20 | 0.24 | * | * | . | −0.30 | 0.56 |
| Leu | 63 | . | . | B | B | . | . | . | 0.61 | 0.31 | * | * | . | −0.30 | 0.39 |
| Asp | 64 | . | . | B | B | . | . | . | 0.58 | 0.71 | * | * | . | −0.60 | 0.76 |
| Ile | 65 | . | . | B | B | . | . | . | −0.20 | 0.79 | * | * | . | −0.60 | 0.76 |
| His | 66 | . | . | B | . | . | T | . | −0.24 | 0.60 | . | * | . | −0.20 | 0.49 |
| Asn | 67 | . | . | B | . | . | T | . | −0.81 | 0.56 | . | * | . | −0.20 | 0.22 |
| Tyr | 68 | . | . | B | . | . | T | . | 0.00 | 1.24 | . | * | . | −0.20 | 0.26 |
| Cys | 69 | . | . | B | . | . | T | . | 0.04 | 0.56 | . | . | . | −0.20 | 0.32 |
| Val | 70 | . | A | B | B | . | . | . | 0.12 | 0.06 | . | * | . | −0.30 | 0.39 |
| Leu | 71 | . | A | B | B | . | . | . | 0.27 | 0.34 | * | * | . | −0.30 | 0.21 |
| Asp | 72 | . | A | B | B | . | . | . | 0.27 | −0.41 | * | . | F | 0.45 | 0.76 |
| Lys | 73 | . | A | B | . | . | . | . | −0.19 | −0.99 | * | * | F | 0.90 | 1.70 |
| Leu | 74 | . | A | B | B | . | . | . | −0.38 | −0.84 | * | . | F | 0.90 | 1.79 |
| Arg | 75 | . | A | B | B | . | . | . | −0.11 | −0.89 | * | . | F | 0.75 | 0.79 |
| Asp | 76 | . | A | B | B | . | . | . | 0.40 | −0.39 | * | . | . | 0.30 | 0.40 |
| Phe | 77 | . | A | B | B | . | . | . | 0.19 | 0.00 | * | . | . | 0.30 | 0.65 |
| Val | 78 | . | A | B | B | . | . | . | −0.07 | −0.26 | * | * | . | 0.30 | 0.52 |
| Ala | 79 | . | A | B | B | . | . | . | 0.08 | 0.17 | * | . | . | −0.30 | 0.48 |
| Ser | 80 | . | A | . | B | . | . | C | −0.32 | 0.74 | . | . | . | −0.40 | 0.30 |
| Pro | 81 | . | . | . | . | . | T | C | −0.28 | 0.87 | . | * | F | 0.15 | 0.42 |
| Pro | 82 | . | . | . | . | T | T | . | −0.43 | 0.23 | . | . | F | 0.65 | 0.83 |
| Cys | 83 | . | . | . | . | T | T | . | −0.17 | 0.37 | . | . | . | 0.50 | 0.46 |
| Trp | 84 | . | . | . | . | T | T | . | 0.42 | 0.49 | . | . | . | 0.20 | 0.30 |
| Lys | 85 | . | A | B | . | . | . | . | −0.13 | 0.46 | . | . | . | −0.60 | 0.34 |
| Val | 86 | . | A | B | . | . | . | . | 0.08 | 0.67 | . | . | . | −0.60 | 0.46 |
| Ala | 87 | . | A | B | . | . | . | . | −0.01 | 0.10 | . | . | . | −0.30 | 0.74 |
| Gln | 88 | . | A | B | . | . | . | . | −0.16 | −0.43 | . | . | . | 0.30 | 0.49 |
| Val | 89 | . | A | B | . | . | . | . | 0.18 | 0.26 | . | . | . | −0.30 | 0.55 |
| Asp | 90 | . | A | B | . | . | . | . | 0.13 | −0.39 | . | . | F | 0.60 | 1.09 |
| Ser | 91 | . | A | B | . | . | . | . | 1.03 | −0.89 | . | . | F | 0.90 | 1.05 |
| Leu | 92 | A | A | . | . | . | . | . | 1.03 | −1.29 | * | * | F | 0.90 | 2.83 |
| Lys | 93 | A | A | . | . | . | . | . | 1.14 | −1.43 | * | * | F | 0.90 | 1.71 |
| Asp | 94 | . | A | . | . | T | . | . | 2.04 | −1.43 | * | . | F | 1.30 | 2.50 |
| Lys | 95 | A | A | . | . | . | . | . | 1.23 | −1.81 | * | * | F | 0.90 | 6.06 |
| Ala | 96 | A | A | . | . | . | . | . | 1.29 | −1.81 | * | * | F | 0.90 | 2.50 |
| Arg | 97 | . | A | B | . | . | . | . | 1.79 | −1.06 | * | * | F | 0.90 | 2.34 |
| Lys | 98 | . | A | B | . | . | . | . | 0.86 | −0.57 | * | * | F | 0.90 | 1.69 |
| Leu | 99 | . | A | B | . | . | . | . | 0.26 | 0.11 | * | . | . | −0.15 | 1.17 |
| Tyr | 100 | . | A | B | . | . | . | . | 0.21 | 0.23 | * | . | . | −0.30 | 0.59 |
| Thr | 101 | . | . | B | B | . | . | . | 0.50 | 0.63 | * | . | . | −0.60 | 0.48 |
| Ile | 102 | . | . | B | B | . | . | . | −0.31 | 1.01 | * | . | . | −0.60 | 0.77 |
| Met | 103 | . | . | B | B | . | . | . | −1.02 | 1.11 | * | . | . | −0.60 | 0.43 |
| Asn | 104 | . | . | B | . | . | T | . | −0.10 | 0.93 | * | . | . | 0.04 | 0.16 |
| Ser | 105 | . | . | B | . | . | T | . | 0.26 | 0.44 | * | . | . | 0.28 | 0.44 |
| Phe | 106 | . | . | B | . | . | T | . | 0.57 | −0.24 | * | . | . | 1.42 | 0.88 |
| Cys | 107 | . | . | B | . | . | T | . | 0.64 | −0.86 | . | . | . | 1.96 | 0.91 |
| Arg | 108 | . | . | . | . | T | . | . | 0.39 | −0.57 | . | . | . | 2.40 | 0.56 |
| Arg | 109 | . | . | B | B | . | . | . | −0.31 | −0.31 | * | . | F | 1.41 | 0.48 |
| Asp | 110 | . | . | B | B | . | . | . | −0.82 | −0.31 | . | . | F | 1.17 | 0.78 |
| Leu | 111 | . | . | B | B | . | . | . | −0.93 | −0.20 | * | . | . | 0.78 | 0.33 |
| Val | 112 | . | . | B | B | . | . | . | −0.27 | 0.49 | * | . | . | −0.36 | 0.14 |
| Phe | 113 | . | . | B | B | . | . | . | −0.38 | 0.49 | * | . | . | −0.60 | 0.14 |
| Leu | 114 | . | . | B | B | . | . | . | −1.16 | 0.49 | * | . | . | −0.60 | 0.28 |
| Leu | 115 | . | . | B | B | . | . | . | −1.16 | 0.37 | . | . | . | −0.02 | 0.20 |
| Asp | 116 | . | . | . | . | T | T | . | −0.93 | 0.13 | . | . | F | 1.21 | 0.37 |
| Asp | 117 | . | . | . | . | T | T | . | −0.89 | −0.16 | . | . | F | 2.09 | 0.46 |
| Cys | 118 | . | . | . | . | T | T | . | −0.19 | −0.16 | . | . | . | 2.22 | 0.46 |
| Asn | 119 | . | . | . | . | T | T | . | 0.38 | −0.84 | . | . | . | 2.80 | 0.48 |
| Ala | 120 | . | A | B | . | . | . | . | 0.98 | −0.09 | . | . | . | 1.42 | 0.45 |
| Leu | 121 | . | A | B | . | . | . | . | 0.09 | 0.34 | . | . | . | 0.69 | 1.29 |
| Glu | 122 | . | A | B | . | . | . | . | −0.12 | 0.46 | . | * | . | −0.04 | 0.56 |
| Tyr | 123 | . | A | B | . | . | . | . | −0.31 | 0.49 | . | * | . | −0.32 | 0.86 |
| Pro | 124 | . | . | B | B | . | . | . | −0.62 | 0.63 | . | * | . | −0.60 | 0.77 |
| Ile | 125 | . | . | B | B | . | . | . | −0.34 | 0.43 | . | * | . | −0.60 | 0.64 |
| Pro | 126 | . | . | B | B | . | . | . | −0.39 | 0.91 | . | * | . | −0.60 | 0.59 |
| Val | 127 | . | . | B | B | . | . | . | −1.20 | 0.80 | . | . | . | −0.60 | 0.29 |
| Thr | 128 | . | . | B | B | . | . | . | −1.17 | 1.06 | . | . | . | −0.60 | 0.34 |
| Thr | 129 | . | . | B | B | . | . | . | −0.96 | 0.80 | . | . | F | −0.11 | 0.34 |
| Val | 130 | . | . | B | B | . | . | . | 0.04 | 0.37 | . | . | F | 0.53 | 0.75 |
| Leu | 131 | . | . | B | . | . | T | . | 0.26 | −0.27 | . | * | F | 2.02 | 1.02 |
| Pro | 132 | . | . | B | . | . | T | . | 1.22 | −0.36 | . | * | F | 2.36 | 1.23 |
| Asp | 133 | . | . | . | . | T | T | . | 1.14 | −0.84 | . | * | F | 3.40 | 3.24 |
| Arg | 134 | . | . | B | . | . | T | . | 1.07 | −1.06 | . | * | . | 2.51 | 5.03 |
| Gln | 135 | . | . | B | . | . | . | . | 1.53 | −1.31 | . | * | . | 1.97 | 4.16 |
| Arg | 136 | . | . | B | . | . | . | . | 1.96 | −1.31 | . | * | . | 1.63 | 3.18 |

What is claimed is:

1. An isolated nucleic acid molecule comprising a polynucleotide having a nucleotide sequence at least 95% identical to a sequence selected from the group consisting of:
(a) a polynucleotide fragment of SEQ ID NO:X or a polynucleotide fragment of the cDNA sequence included in ATCC Deposit No:Z, which is hybridizable to SEQ ID NO:X;
(b) a polynucleotide encoding a polypeptide fragment of SEQ ID NO:Y or a polypeptide fragment encoded by the cDNA sequence included in ATCC Deposit No:Z, which is hybridizable to SEQ ID NO:X;
(c) a polynucleotide encoding a polypeptide domain of SEQ ID NO:Y or a polypeptide domain encoded by the cDNA sequence included in ATCC Deposit No:Z, which is hybridizable to SEQ ID NO:X;
(d) a polynucleotide encoding a polypeptide epitope of SEQ ID NO:Y or a polypeptide epitope encoded by the cDNA sequence included in ATCC Deposit No:Z, which is hybridizable to SEQ ID NO:X;
(e) a polynucleotide encoding a polypeptide of SEQ ID NO:Y or the cDNA sequence included in ATCC Deposit No:Z, which is hybridizable to SEQ ID NO:X, having biological activity;
(f) a polynucleotide which is a variant of SEQ ID NO:X;
(g) a polynucleotide which is an allelic variant of SEQ ID NO:X;
(h) a polynucleotide which encodes a species homologue of the SEQ ID NO:Y;
(i) a polynucleotide capable of hybridizing under stringent conditions to any one of the polynucleotides specified in (a)-(h), wherein said polynucleotide does not hybridize under stringent conditions to a nucleic acid molecule having a nucleotide sequence of only a residues or of only t residues:

2. The isolated nucleic acid molecule of claim 1, wherein the polynucleotide fragment comprises a nucleotide sequence encoding a secreted protein.

3. The isolated nucleic acid molecule of claim 1, wherein the polynucleotide fragment comprises a nucleotide sequence encoding the sequence identified as SEQ ID NO:Y or the polypeptide encoded by the cDNA sequence included in ATCC Deposit No:Z, which is hybridizable to SEQ ID NO:X.

4. The isolated nucleic acid molecule of claim 1, wherein the polynucleotide fragment comprises the entire nucleotide sequence of SEQ ID NO:X or the cDNA sequence included in ATCC Deposit No:Z, which is hybridizable to SEQ ID NO:X.

5. The isolated nucleic acid molecule of claim 2, wherein the nucleotide sequence comprises sequential nucleotide deletions from either the C-terminus or the N-terminus.

6. The isolated nucleic acid molecule of claim 3, wherein the nucleotide sequence comprises sequential nucleotide deletions from either the C-terminus or the N-terminus.

7. A recombinant vector comprising the isolated nucleic acid molecule of claim 1.

8. A method of making a recombinant host cell comprising the isolated nucleic acid molecule of claim 1.

9. A recombinant host cell produced by the method of claim 8.

10. The recombinant host cell of claim 9 comprising vector sequences.

11. An isolated polypeptide comprising an amino acid sequence at least 95% identical to a sequence selected from the group consisting of:
(a) a polypeptide fragment of SEQ ID NO:Y or the encoded sequence included in ATCC Deposit No:Z;
(b) a polypeptide fragment of SEQ ID NO:Y or the encoded sequence included in ATCC Deposit No:Z, having biological activity;
(c) a polypeptide domain of SEQ ID NO:Y or the encoded sequence included in ATCC Deposit No:Z;
(d) a polypeptide epitope of SEQ ID NO:Y or the encoded sequence included in ATCC Deposit No:Z;
(e) a secreted form of SEQ ID NO:Y or the encoded sequence included in ATCC Deposit No:Z;
(f) a full length protein of SEQ ID NO:Y or the encoded sequence included in ATCC Deposit No:Z;
(g) a variant of SEQ ID NO:Y;
(h) an allelic variant of SEQ ID NO:Y; or
(i) a species homologue of the SEQ ID NO:Y.

12. The isolated polypeptide of claim 11, wherein the secreted form or the full length protein comprises sequential amino acid deletions from either the C-terminus or the N-terminus.

13. An isolated antibody that binds specifically to the isolated of claim 11.

14. A recombinant host cell that expresses the isolated polypeptide of claim 11.

15. A method of making an isolated polypeptide comprising:
(a) culturing the recombinant host cell of claim 14 under conditions such that said polypeptide is expressed; and
(b) recovering said polypeptide.

16. The polypeptide produced by claim 15.

17. A method for preventing, treating, or ameliorating a medical condition, comprising administering to a mammalian subject a therapeutically effective amount of the polypeptide of claim 11 or the polynucleotide of claim 1.

18. A method of diagnosing a pathological condition or a susceptibility to a pathological condition in a subject comprising:
(a) determining the presence or absence of a mutation in the polynucleotide of claim 1; and
(b) diagnosing a pathological condition or a susceptibility to a pathological condition based on the presence or absence of said mutation.

19. A method of diagnosing a pathological condition or a susceptibility to a pathological condition in a subject comprising:
(a) determining the presence or amount of expression of the polypeptide of claim 11 in a biological sample; and
(b) diagnosing a pathological condition or a susceptibility to a pathological condition based on the presence or amount of expression of the polypeptide.

20. A method for identifying a binding partner to the polypeptide of claim 11 comprising:
(a) contacting the polypeptide of claim 11 with a binding partner; and
(b) determining whether the binding partner effects an activity of the polypeptide.

21. The gene corresponding to the cDNA sequence of SEQ ID NO:Y.

22. A method of identifying an activity in a biological assay, wherein the method comprises:
(a) expressing SEQ ID NO:X in a cell;
(b) isolating the supernatant;
(c) detecting an activity in a biological assay; and
(d) identifying the protein in the supernatant having the activity.

23. The product produced by the method of claim 20.

The application's sequence listing, which the Patent Office published only in electronic form, follows.

SEQUENCE LISTING (1245 sequences)

SEQ ID NO: 1 - DNA, 733 bp, Homo sapiens
gggatccggagcccaaatcttctgacaaaactcacacatgcccaccgtgcccagcacctgaattcgagggtgcaccgtcagtcttcctcttccccccaaaacccaaggacaccctcatgatctcccggactcctgaggtcacatgcgtggtggtggacgtaagccacgaagaccctgaggtcaagttcaactggtacgtggacggcgtggaggtgcataatgccaagacaaagccgcgggaggagcagtacaacagcacgtaccgtgtggtcagcgtcctcaccgtcctgcaccaggactggctgaatggcaaggagtacaagtgcaaggtctccaacaaagccctcccaacccccatcgagaaaaccatctccaaagccaaagggcagccccgagaaccacaggtgtacaccctgcccccatcccgggatgagctgaccaagaaccaggtcagcctgacctgcctggtcaaaggcttctatccaagcgacatcgccgtggagtgggagagcaatgggcagccggagaacaactacaagaccacgcctcccgtgctggactccgacggctccttcttcctctacagcaagctcaccgtggacaagagcaggtggcagcaggggaacgtcttctcatgctccgtgatgcatgaggctctgcacaaccactacacgcagaagagcctctccctgtctccgggtaaatgagtgcgacggccgcgactctagaggat

SEQ ID NO: 2 - protein, 5 aa, Homo sapiens
  Site (3): Xaa equals any of the twenty naturally ocurring L-amino acids
WSXWS

SEQ ID NO: 3 - DNA, 86 bp, Homo sapiens
gcgcctcgagatttccccgaaatctagatttccccgaaatgatttccccgaaatgatttccccgaaatatctgccatctcaattag

SEQ ID NO: 4 - DNA, 27 bp, Homo sapiens
gcggcaagctttttgcaaagcctaggc

SEQ ID NO: 5 - DNA, 271 bp, Homo sapiens
ctcgagatttccccgaaatctagatttccccgaaatgatttccccgaaatgatttccccgaaatatctgccatctcaattagtcagcaaccatagtcccgcccctaactccgcccatcccgcccctaactccgcccagttccgcccattctccgccccatggctgactaattttttttatttatgcagaggccgaggccgcctcggcctctgagctattccagaagtagtgaggaggcttttttggaggcctaggcttttgcaaaaagctt

SEQ ID NO: 6 - DNA, 32 bp, Homo sapiens
gcgctcgagggatgacagcgatagaaccccgg

SEQ ID NO: 7 - DNA, 31 bp, Homo sapiens
gcgaagcttcgcgactccccggatccgcctc

SEQ ID NO: 8 - DNA, 12 bp, Homo sapiens
ggggactttccc

SEQ ID NO: 9 - DNA, 73 bp, Homo sapiens
gcggcctcgaggggactttcccggggactttccggggactttccgggactttccatcctgccatctcaattag

SEQ ID NO: 10 - DNA, 256 bp, Homo sapiens
ctcgaggggactttcccggggactttccggggactttccgggactttccatctgccatctcaattagtcagcaaccatagtcccgcccctaactccgcccatcccgcccctaactccgcccagttccgcccattctccgccccatggctgactaattttttttatttatgcagaggccgaggccgcctcggcctctgagctattccagaagtagtgaggaggcttttttggaggcctaggcttttgcaaaaagctt

SEQ ID NO: 11 - DNA, 2526 bp, Homo sapiens
gacaggctatccgagaatctgagagctgggcccggcaattcctccagytacccttgtgacctaagtccagtcacacatttcccaaagtttctctttgtcataaccctggtctggctggttttgrggrcttgagaatgggtcagggactccaggccaagtccaacagagaccccaaacccaccacacaccagcagccacaacctcaccaccaacaaagaggacttttgtggggccacaagtaagaggtcatttctggaatggactcagacctttaaacaggagagttgagcacttccagksagtttttaagcaaggcatggggaacagggaatagaacctttcaaagaggttgcccagagaaaagctgggcctcttgcattcggcttccttggagcagcctcttctggcagaaagccatcaggtgctcaatcatcttctcctggccaaggctctgaccatgcttagtactggaatagaggtggccaggcccccagcgactcttcttggcctgatgtttgtcctcacaggcatgccacgtggcctgagatgattcagaacaaatcatgctaactttgaatccatccagccacttgcaaatgataatcagaagtcagcttgttcactgttagaaagaaactaacaaaagagaacccagagcaatctagaatctttgagtgcttggctttccaaggatactgcggagactctggccaagctgatgamcttctgaartgtcactggcaccatatgcaacaagaaccaccattcactgagtagctaatgggtttggggcctgggacattccatctgaggtccttcctgaacatgtcactccacagcagaggaccggttgcagcttacccagaaccactcctccaggagagctggatgttttgcgtgcaacaccttgagcactgactgctattgttcaaaaaaagcctttgctgcattcggaggactgccccgtgccctgaggtgacttcctaactatgtggtttcattagcgaatttattttttgtgctgggtggacatttgtattttgttaggttgctgtttaagctcaagtttgctgtgctctctgcagctacaaaacatcttggcatatttaagaktggcttttataaatagctttattctgatattaatcagattcccaactttactgagaattaaggactggggtactttaaagaaatgcaaatagcaattgaagaaccactgctgcaggtggtagccctggctagactgaattacactagaaatcagccagaaggaagcgtccttgggatcccagatcactctttttttttttttttttaaaaggggcagccccttgatggctcatctctctgaataacagttacgtcttcatatcgataccagatgccttcttcatcatgccactgaagccactcaccaccttcaagaacatgccaacctctgtcagattcacttacccacaaacaaggaggcacgtttggcacaaagtgttgtcctccaggtccaagtggactctacagagtgcttgacctcaacacactggattccaggtggactggaccaagagcaggcaaagacacgggaactgaaaaactccacagggtttggagaatagaaatgaaaagccacgtcatataactcaagaataaatggtgttttggaaattttaaaattatcatcgaaggtggtgaaactatttcaggcccaaatgaaaggaaatcgccagttggggatgaaatcacagagcctgtgttttatgatatggttggatgtccactgatgaaattttaaaggagtttcatttttaaaagtgcgcatgattctacatatgagaattctttaggccaagaaactgtccttggctcagaggtgttgggaattaaagcagagagaagccattcgtgatgcttagaaccaaggatggtcatgtacacaaagaccatcgagacggccattcttgtttacaaaacacttaccaagaaagcactttgtaggggaactttagtaagttcttctcatttcattatgtttcttccaaggaaacaggagagactgaattaataattctctctttcctcttaagcacttttaaaataataaagtacatcttgaaatttgggggggcatctctgatttaaaaaaagaaaaaggctgcttgatgtatgttatgcagagacactctgcctctggtggctgcagagcaatacccaagcctcatttggaaggctcaacatttggaattgcactttaattgattaatcctcaattcatgtggccttacgggatggtgggtctgggaccccaattcattcttatctgccaaagaattatctagaagcacatcaaataccagcaccccacctgcacaatgggggtggaaaacttttgtatccctaagcatattattttatagtgtctgccatgccatgtggaaatactttatttttaacctcaggatttaaataaagtaaacactatgacatttaaaaaaaaaaaaaaaaaactcgaggggggcccggtaccca

SEQ ID NO: 12 - DNA, 1131 bp, Homo sapiens
  SITE (839): n equals a,t,g, or c
cactgcaccagctttgttatctgtaaaatgatgataataccaacaccttcttcttggggtactgaagatgagagaacatgatatgtgtaaagtgccttccacaatacccagaacatagcaaacatgtaatgaatgtagtaatagtaattattttattttcttttgattcagttgggactatgttcagctgtaacagaatacccaaaataactgttttaaacaaattaaagtttwgttgtgaagttttgttacgaattcagacaatccagggcttttatagatgcaccaggatcagcaggtacaaaggcatctttcctgatttctgccagtctcaatgcatgggttgcaatccagartccargatggcagttccagccctggttacgcccatattagcacacagaaagaaagagaaagggatgtgcctcttcactttaatcatagctcccactagatgcacccactacttctgctgatactccattagctaatgcttgcttacatggtcacacttagtttccagagagacatgtctggacagtcatgtgctcaattaatatccaagtgtccaattactgagaaaaaaagaaactagcacctttgcttggttgcattcctcttagcataagccacattctttttatgaagttgtcctcagttacttggatgcctcagttgtcctttcawttagaaawgcycctkggacaycctgaawctgacttcttttgtcatcagcaccatcactaccactgccytcttcaaagccaccacgttctgtccccaggatggttgcaacaaccaccatagggactttttgccttctacttccacacaatagnccagagtaagcttttgaaaatgtaggtcagatcatgtctctctcttcctcttcaaaaccctcccgatggcttttcatattactcaaaagaaaacctaaaactttgctgtgagatctatgtgacccggcttattcttcctcttactttatctctgtattgctcttcctcactctactccagccatcccacctccttgctgcttgtcctatactcctaaaagaagttcagtcttcccttatgatatttgcacttaaaatagaaaaaaaaaaaaaaaaaaaactcgaggggggcc

SEQ ID NO: 13 - DNA, 941 bp, Homo sapiens
ggcacgagtagcatttcatttaatctgcaggtatattctcccaacagtttattgtcatgtgatgtcctcagccaagattgtraggcagagaggagctgtcccaacctactataccaccgaggctggagagatcatatttttggtattaaactggagtctctccatccttcacattgttgatgtcctctgtagcaaaccggaaaagtcagtgacagaagatgccgctagcggtttgagccagagaatgacagctctggtttggagaaaagggccggatggtggctctagaaagcccatccttctgctcttcttttttctcccccttatattgtgctttcattcattcattcattcatcaaacatttgttgagcacctattatgtgtcaagctctgtgctagcctctggaaaacctgccctcatgtagctcactgtggagtaggagaaacaatgactacactatgataagcacgggttgtcagggtctcacagagcagtggcccctcatccagaccgatgaggtcaaagaaggcatccaggcgaggatggtgtcagagctaactgaagaatgagagggagctgcaccascaggggttggaactgaaggtggcagtgcctggagtcttgattccagcagagggagagcagtctgtgaaaaggcaccaagggtgggagagggcagagcacatggaggaacttcaggtagttctggatggcsctggggcaaagctagagaggtaagaagaatctacaaatgttcctcgagttacatgaacttccatcccaataaacccattggaaacgaaaaatttaagtcagaagtgcatttaaggctggtccgagtagaatgatttttacaacgaattgatcacaaccagttacagatgtctttgttccttctccactcccactgcttcacctgactagcctttaaaaaaaaaa

SEQ ID NO: 14 - DNA, 843 bp, Homo sapiens
  SITE (2): n equals a,t,g, or c
  SITE (19): n equals a,t,g, or c
  SITE (87): n equals a,t,g, or c
  SITE (89): n equals a,t,g, or c
  SITE (525): n equals a,t,g, or c
cnagggataaccccaaagntgggaaataaaccctcaattaaagggggaaccaaaaagctgggaagttcccccccgcggtggcggccngntctaggaactagtggaatcccccggggctgcagggaattcggcacggagtgggaatgttgtttgtatgatactatttccacaawatgcattgagacttggtktgtggcctaggacatggtcaattctttytaaatattccgtgaatttctttagtgcatattctccgatgggggctgtggggacagagttctaaatatgcccattagattaaatctcttcattctgttgctcacatcttctatatccttattaatctgtcaatctcttcaagagaggtgttattaaaatctctcactgtatgtgtcactttgcccttaaaattctgatgatttgctttataaatggttataaccattttccaggaagaacattaaagaactttccattggcattatccagtttccctcaaaatactggttttttttattttggctnctaagcagctatgaatccagtttctcagaagcccttgtctcaaggcatttgtttccagattaccttgttagcatccacactatgggctattttagaaaaacaaaaaaagtatcaaaatcatatagctatgattttcctgtgcttgaaggagccttaaagctcatctagtccagccagtatttgttcatccaaattctgccaagaaatctctattgtcaagatattctttaccatctttgggacattctcattattagaaacaaatcctaagaagaaattctgccatakacaacccatccgttctttaaaaaaaaaaaa

SEQ ID NO: 15 - DNA, 1018 bp, Homo sapiens
ctgtaatttttaattttcatataccgtgctttgattctaattttattttttgagttctctgaaggttacatatacagagtgcttcaggaatgatcattttgttattattcatgcttcttaacaatgttgttttagtccaagaagataattgccagagaaagaatacagtgcaggaaagaagargctggagccagtggtgaagarggattgagargacagacattgtgggaatgaaatcatgaataatcgtgtttttgaattgtccaaaaacttctacaaaccatgaaatgttggagtttaaatctaattgttgaaaaattccccacattccttgtatcccttaggttgagcataattccacatccgtggactgatgcacttcccaagagggggcctcattaactcttccgaggcagcagcagcaagggcaccccctcctttccccccacaccccayttctcatggctcttctttctctcatctcatgcttaggttagaaaagggcacaaggtaaggaagcccttgggaataggctgaatctggctatctaatttggtgccaaatacttaatgtgcttgaatttaaaaacagcaaacatgtagaaaggtaattataattatgaggccagttctttaagctagctttttttcccctctcaaacagcatattggcttggatgtcagcaggagaaagtgttttttgcaatacacataatgcatatatggtcctgttagcaatctatagaaaatagatattgctcattaaggtaaatatttttgttgatgaatgatctggaatggtctggacttgttgtgtgaacaggaaattgctctgtaggctttgacttgtgaggtaaagagtgaggctggtaagattaattaaagtaaatactgtgacaataggatgtcaaaaccaaaaacgtgtttctgaaactcaaggaattaatgacacatagggaagtttttgccatattaagcatagagtaggagaggcaagtcaagaataaaaaaaaaaaaaa

SEQ ID NO: 16 - DNA, 661 bp, Homo sapiens
  SITE (25): n equals a,t,g, or c
  SITE (478): n equals a,t,g, or c
  SITE (661): n equals a,t,g, or c
tttaagaaattagtgaatccccggntgcagggaattcggcacgaggaggaggccgtcagctggcaggagcgcaggatggcagctgytcccccgggttgcacccccccagytctgctggacataagytggttaacagagagcctgggagctgggcagcctgtacctgtggagtgccggcaccgcctggaggtggctgggccaaggaaggggcctctgagcccagcatggatgcctgcctatgcctgccagcgccctacgcccctcacacaccacaacactggcctmtccgagctgctggagcatggagtgtgtgaggaggtggagagagttcggcgctcagagaggtaccagaccatgaaggtgcgcagggcagggctcggacctaccccaggaatgtcctgccctgggaatgacaacacagtccacaccatgcacggggaggcaaacaggggcagctgacccagcccaggggtcagangaggtcttgccgaggaagtggcagctaagctgatacctgatatgcacwagkcagccargyggagacaggcaaggaagaagcttgttttgaggacagaattttctagatcactcagcaccatctggcttttggggctttttgttttattttgtttttgagacggggtctcgctctgtcgcccan

SEQ ID NO: 17 - DNA, 553 bp, Homo sapiens
  SITE (507): n equals a,t,g, or c
ggcacagggctatttgcccctctctccacatgacagaactgctctaagtttctttgctgctcttctcagctgtcagacggcttgctgcttgttttccacaccaccatgtctattctttgctgtccttwactctgcctgtttttttccttttgtatttcttctggctcttgtcccttttcccacgtgtcwcagctttcctttattgccactttcagtcagagcagtcctgtgcttctggtgccggcatacaatacttacttgagtttcttggcttttcttgactgtgcatctcttacttcaacataggaatagcctgtcatagaatttctccagttccagggctcaagagggagagtgccagaaaattgagactgttttccctgtcttggattgaattcataaagcaaaaccagtgtttgtgtgagggtttgctgtgtcatgcctataggttgtttgggtgcaaacctatagaatccagcctgcgaaaagaaagraaccagagaatancagcatcagaacaatgcttgacatcatttctcaatcaagcagtcca

SEQ ID NO: 18 - DNA, 869 bp, Homo sapiens
  SITE (635): n equals a,t,g, or c
ggcacgagctgccaacactgaggtcttcgtggcttctcacatctagatgtatccctctcaaatctatcctctatccaggcaccagattgaggtatctaaaatgtcaactttccagttactccttcttatactagcccaatcaacttacaagataaagtccaagccccttcatatgacaaaccacaccctgcttaactctccaggtttgaatccttcatctcctactttaaactttaaaacccagcagcacgaaagtgtctcctatgcatgttgccatatgcgttctctccatcatgcatttgcctgagcaagatgtcttgagttaacatcttattctttaagactcattgtggtggtagacagcctttaataacggatccttggccaggcacagtgactcacacctgtaatcccagaactttgaaaggccaaagaaggaagaaagcttgaggccagtagtttgagaccagcctgggaaacagagagatatcccatctgtaccaaaaatttaaaaaaatattagcagggagtagtggcatgcacaagtggtcccagctccatgggagastgaggtaggaacatcacttgagcccaggaagtcaaggctgcagtgaaccatgatcagaacattgcantccagcttgggtaacagagtgagaccttaggtcagaaaaatgaataaataagcataaaattttaaaaacttagccaggcatggtggcacacatctgtggtccctgctacttaggaggctgaggtgagaggatccttgagcccaggaggtcaacactacagtgagctatgattgtgccactaaactccaacctgggtgaaaaagcaaaaccctgccaaaaaaaaaaaaaaaaact

SEQ ID NO: 19 - DNA, 959 bp, Homo sapiens
  SITE (930): n equals a,t,g, or c
ggcgagccgagatcgtgccattgcactccagcctgggcaacaagagtgaaactctgtctcaaaaaaaaaaaattataatactatatgccataaaatgacatttcatatttaaagagttttttaaaactcttgtattcacatgccataatttgaaaccctatttcactgaatgagaatggtatctgttgtcctcattttttcatttttatccttaacaatttccaccacagccagtgcatataatggcaatgacacccagggatggaatgataagttccatcrcmgctcagtcaagacgcagacttgatgtggccccaacaacagtcaataatggagtctccaaaataaagctctataggaaaggtaaatacccgctgcacaagaaaccacagcatctaggttctaaccccatctctatgaagagcttgctgggagagttttgacattwaacaatctgtctgatkgccaattttyttcttctataaaatgataatgttkgaytcaaagatccaaagtcaattcatggtctaaaacttaatgatttttttaggttttgkgacatttcactgtacactgtagtaatttatatcttattttcccactaatttagaaaaatatytaaatgatccttaattggcaatgggtcctaagaattttgttttaaatccctgttacccaaaagagcccttttttgtatctcgcagtagttacaaggatctttctaaatcttaaaaaaaaaaaaaaaagaaagaaagaaaagaaaagaaaaaaagtcagccgggcgtggtggctcatgcctgtaatcccagcactttgggaccaaggtggacagatcacgaggtcaggagatggagaccatcccggccaacatggagaaaccctgtctctactaaaaaaaaaaaaaactcgaggggggcccggtacccaatncgccggctagtggtcgtaaaacaatcaaa

SEQ ID NO: 20 - DNA, 1446 bp, Homo sapiens
cggggcagggctgtgtggcaccgccagggagcgggcccacctgagtcactttattgggttcagtcaacactttcttgctccctgttttctcttctgtgggatgatctcagatgcaggggctggttttggggttttcctgcttgtgccaagggctggacactgctggggggctggaaagcccctcccttcctgtccttctgtggcctccatcccctcatgggtgctgccatccttcctggagagagggaggtgaaagctggtgtgagcccagtgggttcccgcccactcacccaggagctggctgggccaggaccgggagagggagcactgctgccctcctggccctgctccttccgcagttaggggtggaccgagcctcgctttccccactgttctggagggaaggggaaggagggggtcttcaggctggagccaggctgggggtgctgggtggagagatgagatttagggggtgcctcatggggtgggcaggcctggggtgaaatragaaaggcccagaacgtgcaggtctgcggaggggaagtgtcctgagtgaaggaggggacccccatcctgggggatgctgggagtgagtgagtgagatggctgagtgagggttatggggagcctgaggttttatgggcctgtgtatccccttctcccggccccagcctgcctccctcctgcccgcctggcccacaggtctccctctggtccctgtccctctggtggttggggatggagcggcagcaaggggtgtaatggggctgggttctgtcttctacaggccaccccgaggtcctcagtggttgcctggggagccggacggggctcctgaggggtacaggttgggtgggccctccctgagggtctggggtcaggctttggctctgctgcctctcagtcaccaagtcacctccctctgaaaatccagtcccttctttggatgtccttgtgagtcactctgggcctggctgtcgtccctcctcagcttcttgttcctgggacaagggtcaagccaggatgggcccaggcctgggatcccccaccccaggacccccaggccccctcccctgctgctttgcggggggcagggcagaaatggactccttttgggtccccgaggtggggtcccctcccagccctgcatcctccgtgccstagacctgctccccagaggaggggccttgacccacaggacgtgtggtggcgcctggcactcagggacccccagctgccccagccctggtctctggcgcatctcttccctcttgtcccgaagatctgcgcctctagtgccttttgaggggttcccatcatccctccctgatattgtattgaaaatattatgcacactgttcatgcttctactaatcaataaacgctttatttaaagccaaaaaaaaaaaaaaaaaactcgagggggggcccgtacccaattcgcca

SEQ ID NO: 21 - DNA, 1471 bp, Homo sapiens
  SITE (1470): n equals a,t,g, or c
caaaaaataataatgataatttaaaataaataagtaactaataaaaagattttatatcccagtcttatgatgttggttggcaaggctagataaaaagatgttagaatgaaagaacatatttttagtgatatgtaaatgaaggattctacaatagtcatatatttttatatgaatgaatgttgggttgggctggagaggtatgtgtgtgtaaatataaaggtctcacattcagagtatagctctgaaataatggaactcatgtctacaattcaacatgcatctgtatagttacatctcatgtaaatatacacagacatattttgcagccagtaattgacagttaatgtccaaaacaggtgattgataggtaacagaaattagataaccaccaattttgcccaagagaaagactagaaggactaaaagcagttgaatgtatggtactgacattgtcataagcagtctgataaccagtttattgaaacgtgtgcattaacagagaatttaattttaaacccataatttctcctatccattaaaatattataattgttagtagtatgaaaccaacaggaaatgttttttaatcatttagtgaggtgattcatttgtttcatgggcaaacactatccaggaaaagccttgcttgcctgtttcccaaagagctctaagaaatagaatcaagtgtaaaatggttcagaccattcaggatttcttgtcactcttctcaaccccgatcttcctgttattactgatgtttgaaaccctgtcattagccccggcctggttaaagcccctcagagtcacctctcattcatagcaatagaattcaaccccaagtggttgatggtgtccccagcacagccgagagacctgatctctggattcagtgcttttagctcttcgagtttaccctaagataccttcgggcaatatttttaaccaacccaaaagctcttcaggtcatttctgaagaggacaaggtgaatcttggcttggaacaccatttttgggctcttgctactgaatgaatcagaaaggaattttttctgaagagcattagaaagtaaaggagatgttaaaataagttcttgaagtatgttttatatttatctaaaacactgattttaaaagtttacattcaaatgtgtattcaaaagaagtactgatttgtaattattatagtttgtgtgtatcatccccttttaaccgtgcctaacaactgtacttaaattttgttttcctagtgtaacaaatgtttcccataagattttctagagccaaataatgggagtgaaaaattccttaagtgttatataagaaaatatattagaaaatcagctttggattatacgatttctaaaatatactaatacagaatcctcagtaatatgttttgaattggattttttctcagaactgttacataataaataatacatcaaccagaaaaaaaaaaaaaaaaaattnc

SEQ ID NO: 22 - DNA, 1402 bp, Homo sapiens
agggacgtcttgcctgaggagatgcccatttctgtcctggrttaccctcactgcgtggtgcatgagctgccagagctgacggcggagagtttggaagcaggtgacagtaaccaattttgctggaggaacctcttttcttgtatcaatctgcttcggatcttgaacaagctgacaaagtggaagcattcaaggacaatgatgctggtggtgttcaagtcagcccccatcttgaagcgggccctaaaggtgaaacaagccatgatgcagctctatgtgctgaagctgctcaaggtacagaccaaatacttggggcggcagtggcgaaagagcaacatgaagaccatgtctgccatctaccagaaggtgcggcatcggctgaacgacgactgggcatacggcaatgatcttgatgcccggccttgggacttccaggcagaggagtgtgcccttcgtgccaacattgaacgcttcaacgcccggcgctatgaccgggcccacagcaaccctgacttcctgccagtggacaactgcctgcagagtgtcctgggccaacgggtggacctccctgaggactttcagatgaactatgacctctggttagaaagggaggtcttctccaagcccatttcctgggaagagctgctgcagtgaggctgttggttaggggactgaaatggagagaaaagatgatctgaaggtacctgtgggactgtcctagttcattgctgcagtgctcccatcccccaccaggtggcagcacagccccactgtgtcttccgcagtctgtcctgggcttgggtgagcccagcttgacctccccttggttcccagggtcctgctccgaagcagtcatctctgcctgagatccattcttcctttamttcccccamcctcctctcttggatatggttggttttggctcatttcacaatcagcccaaggytgggaaagctggaatgggatgggaacccctccgccgtgcatctraatttcaggggtcatgctgatgcctctcgagacatacaaatccttgcctttgtcagcttgcaaaggaggagagtttaggattagggccagggccagaaagtcggtatcttggttgtgctctggggtgggggtggggtgtttctgatgttattccagcctcctgctacattatatccagaagtaattgcggaggctccttcagctgcctcagcactttgattttggacagggacaaggtaggaagagaagcttcccttaaccagaggggccatttttccttttggctttcgagggcctgtaaatatctatatataattctgtgtgtattctgtgtcatgttggggtttttaatgtgattgtgtattctgtttacattaaaaagaagcaaaaataataaaaaaaaaaaaaaaaaact

SEQ ID NO: 23 - DNA, 1047 bp, Homo sapiens
  SITE (301): n equals a,t,g, or c
ggcacaggggactacaggcacccacgaccatacccagctaatttttgtatttttttgtagagatggggtttcacgatgtcgcccaggctggtcttgaactcctgggcttgagcgatcttcccatctttccatcttggcctcctaaagtgctgggactgcaggcatgagccaccatgcccagccaagattcttattgattaccatgttgcttcaagaagccaagccagtttccaatattccccatttgctggagtcttggtactttgggtagaagcaactggtaaattgttaattggaacanttggtggtgtagataaccacgtatggccaaacctagagcatctaggctcacaattactatcctgacttgataacaagtgttctgatattaacctgaaaatgggaataatgccaaatctgtgtaacttaacatctatatacacagtggggagaactgaagttattaaacctggaatctctgtgatcaaggctaacagtagttatctaagaagcaaaggacctacaattcttagacttggagtcatattctttaaggacgtgttctgaaactatatcaagcatctggtttccacgtatttctccctcagaaattatgaagtacaagtaaaaatgaaggtacagggtaagacacatgctgctttcttgctcttgagtggagacagttttccagccatcttaaccccttwacacaaaacaatttgtgttttatagcaaataagtgactcaacataatttcaatatgatgtttatccaccagtactttcctttcagcttctagtcccataartggtttgtgaagtcatcggttacattagccaagataggcctagacttgaagtctagaatgtttttcccactatatgccaaagtagaatgtgggtatctcagggtcatttttgttgttcaatttcccacctgtacagttgttatgattcactttccttatgtgtctaataaatcttgttccatgaaatgatcaaaaaaaaaaaaaaaaaaactcgagggggggcccggtacccaaatcgc

SEQ ID NO: 24 - DNA, 990 bp, Homo sapiens
  SITE (834): n equals a,t,g, or c
ttggaaagggtctagctctttctcattcaccaactatattagaagcacttgagggaaatttaccactccaaatccaaagcaatgaacagtcttttctggatgattttattgcctgtgtcccaggatcaagtggtggaaggcttgcaaggtggcttcagccagattcatatgcggatcctcagaaaacatctttgatcctggaataaggatgatattcgttgtggttggcctaccaccataactgttcaaacaaaagaccagtatggggatgtggtacatgttcccaatatgaaggtaattataactggattaaattagcagacatctatatactggctgcaatgactgataaaattttagaaatgccaagtgctgagrgtccatttgttctaccctctttatataaagggtgatgctgaaagtttgtttaaatgacttgtttatattaattagtccccaagtgtccaagttacacctgttttttttgtgagtttgttctttacattttgctacctgttacggggactcaaaggagggataagaaagtatccatctaaagagtgctagacacatacagtgaagcccctcaatatgtattgattgaataaatgcatgaaagaatacatttttaaattttgtgtatagttttgaaagactcaagtacgttctgtgtttggtattactgaaaccacattttaaaaataacactcattaagttagaaatatatgagtttagattgtaaaagaatgaggaattgaaatagttgtataccatattgatgaatatagagtttttaggatacctcttacctgaaatattaataataatgtttncagagcatattatacataattatttgtgatttaatctgttaatatgaatatctcatttaaaacttttatttctgaaaaaattatattgaataaaattttatataggcagtccccagccctttcctccttcaaagttgtcttatagagtgattggtt

SEQ ID NO: 25 - DNA, 1208 bp, Homo sapiens
taatcgctactatagggaaagctggtcgctgcaggtaccggtccggaattccgggtcgacccacgcgtccgagcgaaatggcgcctccggcccccggcccggcctccggcggctccggggaggtagacgagctgttcgacgtaaagaacgccttctacatcggcagctaccagcagtgcataaacgaggcgcasgggtgaagctrtcaagcccagagagagacgtggagagggacgtcttcctgtatagagcgtacctggcgcagaggaagttcggtgtggtcctggatgagatcaagccctcctcggcccctgagctccaggccgtgcgcatgtttgctgactacctcgcccacgagagtcggagggacagcatcgtggccgagctggaccgagagatgagcaggagcktggacgtgaccaacaccaccttcctgctcatggccgcctccatctatctccacgaccagaacccggatgccgccctgcgtgcgctgcaccagggggacagcctggagtgcacagccatgacagtgcagatcctgctgaagctggaccgcctggacctcgcccggaaggagctgaagagaatgcaggacctggacgaggatgccaccctcacccagctcgccactgcctgggtcagcctggccacgggtggtgagaagctgcaggatgcctactacatcttccaggagatggctgacaagtgctcgcccaccctgctgctgctcaatgggcaggcggcctgccacatggcccagggccgctgggaggccgctgagggcctgctgcaggaggcgctagacaaggatagtggctacccrgagacgctggtcaacctcatcgtcctgtcccagcacctkggcaagccccctgaggtgacaaaccgatacctgtcccagctgaaggatgcccacaggtcccatcccttcatcaaggagtaccaggccaaggagaacgactttgacaggctggtgctacagtacgctcccagcgctgaggctggcccagagctgtcaggaccatgaagccaggacagaggccaggagccagccctgcagccctccccacccggcatccacctgcatccctctggggcaggagcccacccccagcacccccatctgttaataaatatctcaactccarggtgttccacctgaaaaaaaaaaaaaaaaaaaaaaaaaaaaaaaaaaaaaaaaaaaa

SEQ ID NO: 26 - DNA, 1922 bp, Homo sapiens
  SITE (1022): n equals a,t,g, or c
gtgctgcgctactgagcagcgccatggaggactctgaagcactgggcttcgaacacatgggcctcgatccccggctccttcaggctgtcaccgatctgggctggtcgcgacctacgctgatccaggagaaggccatcccactggccctagaagggaaggacctcctggctcgggcccgcacgggctccgggaagacggccgcttatgctattccgatgctgcagctgttgctccataggaaggcgacaggtccggtggtagaacaggcagtgagaggccttgttcttgttcctaccaaggagctggcacggcaagcacagtccatgattcagcagctggctacctactgtgctcgggatgtccgagtggccaatgtctcagctgctgaagactcagtctctcagagagctgtgctgatggagaagccagatgtggtagtagggaccccatctcgcatattaagccacttgcagcaagacagcctgaaacttcgtgactccctggagcttttggtggtggacgaagctgaccttcttttttcctttggctttgaagaagagctcaagagtctcctctgtcacttgccccggatttaccaggcttttctcatgtcagctacttttaacgaggacgtacaagcactcaaggagctgatattacataacccggttacccttaagttacaggagtcccagctgcctgggccagaccagttacagcagtttcaggtggtctgtgagactgaggaagacaaattcctcctgctgtatgccctgctcaagctgtcattgattcggggcaagtctctgctctttgtcaacactctagaacggagttaccggctacgcctgttcttggaacagttcagcatccccacctgtgtgctcaatggagagcttccactgcgctccaggtgccacatcatctcacagttcaaccaaggcttctacgactgtgtcatagcaactgatgctgaagtcctgggggccccagtcaagggcaagcgtcggggccgagggccnaaaggggacaaggcctctgatccggaagcaggtgtggcccggggcatagacttccaccatgtgtctgctgtgctcaactttgatcttcccccaacccctgaggcctacatccatcgagctggcaggacagcacgcgctaacaacccaggcatagtcttaacctttgtgcttcccacggagcagttccacttaggcaagattgaggagcttctcagtggagagaacaggggccccattctgctcccctaccagttccggatggaggagatcgagggcttccgctatcgctgcagggatgccatgcgctcagtgactaagcaggccattcgggaggcaagattgaaggagatcaaggaagagcttctgcattctgagaagcttaagacatactttgaagacaaccctagggacctccagctgctgcggcatgacctacctttgcaccccgcagtggtgaagccccacctgggccatgttcctgactacctggttcctcctgctctccgtggcctggtrcgccctcacaagaagcggaagaagctgtcttcctcttgtaggaaggccaagagagcaaagtcccagaacccactgcgcagcttcaagcacaaaggaaagaaattcagacccacagccaagccctcctgaggttgttgggcctctctggagctgagcacattgtggagcacaggcttacacccttcgtggacaggcgaggctctggtgcttactgcacagcctgaacagacagttctggggccggcagtgctgggccctttagctccttggcacttccaagctggcatcttgccccttgacaacagaataaaaattttagctgccccaaaaaaaaaaaaaaaaaaaaaaactcgagggggggcccgtacccaattcgccctataa

SEQ ID NO: 27 - DNA, 1951 bp, Homo sapiens
  SITE (1892): n equals a,t,g, or c
  SITE (1930): n equals a,t,g, or c
  SITE (1934): n equals a,t,g, or c
tcgtccccagagcgggctgagccccaggcgsagggtggcgggggagcctgggggagccgccgccacctccacgggcctctctgagctcggacaccagcgccctgtcctatgactctgtcaagtacacgctggtggtagatgagcatgcacagctggagctggtgagcctgcgccgtgcttcggagactacagtgacgagagtgactctgccaccgtctatgacaactgtgcctccgtctcctcgccctatgagtcggccatcggagaggaatatgaggaggccccgcggccccagccccctgcctgcctctccgaggaactccacgcctgatgaacccgacgtccatttctccaagaaattcctgaacgtyttcatgagtggccgctcccgctcctccagtgctgagtccttcgggctgttctcctgcatcatcaacggggaggagcaggagcagacccaccgggccatattcaggtttgtgcctcgacacgaagacgaacttgagctggaagtggatgaccctctgctagtggagctccaggctgaagactactggtacgaggcctacaacatgcgcactggtgcccggggtgtctttcctgcctattacgccatcgaggtcaccaaggagcccgagcacatggcagccctggccaaaaacagtgactgggtggaccagttccgggtgaagttcctgggctcagtccaggttccctatcacaagggcaatgacgtcctctgtgctgctatgcaaaagattgccaccacccgccggctcaccgtgcactttaacccgccctccagctgtgtcctggagatcagcgtgcggggtgtgaagataggcgtcaaggccgatgactcccaggaggccaaggggaataaatgtagccactttttccagttaaaaaacatctctttctgcggatatcatccaaagaacaacaagtactttgggttcatcaccaagcaccccgccgaccaccggtttgcctgccacgtctttgtgtctgaagactccaccaaagccctggcagagtccgtggggagagcattccagcagttctacaagcagtttgtggagtacacctgccccacagaagatatctacctggagtagctgtgcagccccgccctctgcgtcccccagccctcaggccagtgccaggacagctggctgctgacaggatgtggcactgcttgaggaggggcacctgccaccgccagaggacaaggaagtggggcgctggcccagggtaggggagggtggggcaatggggagaggcaaatgcagtttattgtaatatatgggattagattcatctatggagggcagagtgggctgcctggggattgggagggacagggcttggggagcaggtctctggcagagaaggatgtccgttccaggagcacacggccctgccccatcctgggccttacctcccctgccagggctcgggcgctgtggctcctgccttgatgaagcccgtgtcctgccttgatgaagcctgtgccacctgcaagtgcccgccctgcccctgccccaacccccaccgaagagccctgagctcaggctgagcccagccacctcccaaggactttccagtgaggaaatggcaacacgtggaggtgaagtccctgttctcagctccgtcatctgcggggcttctgggtggctcctgccactgacctcaccggcatgctggcctgtggcaggcctaggacctcaggcggggaggaggagctgccgcaaggccctgtcccagcagaagagggaggcttcctgactgacacaggccagccccatcttggtcctgtcaccctggccccaactattaaagtgccatttcctgtcaaaaaaaaaaaaaaaaaatcggggggggcccggaanccaatttcccccaaaaaggggggttataaaaattcccnggcngtgtttttaaaaattcg

SEQ ID NO: 28 - DNA, 3989 bp, Homo sapiens
  SITE (17): n equals a,t,g, or c
ggcacaggccgcagggnacctatgggcgcatataggttgtaatgaaactgtagtctcagttggaagcctagacatgaaatgggtcagtgagcaaggctctattcctagtctccagccatgcctgtggaacctgarcccrctctcagcacattggacccaggcagatgyaaaaaattcacagaactatgatttggactcaagggtttgtagatttcctccttcattctaatttcagtgtctaaaattcttgcatccrtgaacgagctgggcatttgatgagacagggcygaatactgcagttttcctcctagaaatcatctggggcattttctttgaactgatgggaacaataaggcataactgtttgcacaaacttgggataartgattttgggataacgatctaccagaatggggatatttcacccttggttctgagatgcaaaccaaagaatatcatgaccagctttcaggcctcctgaagtatatctctcacattgtcctgttctcatgctgaggagcctgagatccctgtgtggggattagacagtggactgttatgggtgtaggtgaattggcttattttgtctgtccctgtctgaatgtattgcaggaaytaaaaaggaccaagaagaggaagaagaccaaggcccaccatgccccaggctcagcagggagctgctggaggtagtagagcctgaagtcttgcaggactcactggatagatgttattcaactccttccagttgtcttgaacagcctgactcctgccagccctatggaagttccttttatgcattggaggaaaaacatgttggcttttctcttgacgtgggagaaattgaaaagaaggggaaggggaagaaaagaaggggaagaagatcaaagaaggaaagaagaaggggaagaaaagaaggggaagaagatcaaaacccaccatgccccaggctcagcagggagctgctggatgagaaagrgcctgaagtcttgcaggactcactggatagatgttattcaactccttcagttgtgttgaactgtgtgactcatgccagccctacagaagtgccttttatgtattggagcaacagcatgttggcttggctgttgacatggatgaaattgaaaagtaccaagaagtggaagaagaccaagacccatcatgccccaggctcagcagggagctgctggatgagaaagagcctgaagtcttgcaggactcactggatagatgttattcgactccttcaggttatcttgaactgcctgacttaggccagccctacagcagtgckgtttactcattggaggamcaktaccttggcttkkctcttgacgtggasaaattgaaaagaaggggaaggggaaraaaagaaggggaagaagatcaaagaaggaaagaagaaggggaagaaaagaaggggaagaagatcaaaacccaccatgccccaggctcagcagggagctgctggatgagaaagggcctgaagtcttgcaggactcactggatagatgttattcaactccttcaggttgtcttgaactgactgactcatgccagccctacagaagtgccttttayrtattggagcaacagygtgttggcttggctgttgacatggatgaaattgaaaagtaccaagaagtggaagaagaccaagacccatcatgccccaggctcagcagggagctgctggatgagaaagagcctgaagtcttgcaggactcactggatagatgttattcgactccttcaggttatcttgaactgcctgacttaggccagccctacagcagtgctgtttactcattggaggaacagtaccttggcttggctcttgacgtggacagaattaaaaaggaccaagaagaggaagaagaccaaggcccaccatgccccaggctcagcagggagctgctggaggtagtagagcctgaagtcttgcaggactcactggatagatgttattcaactccttccagttgtcttgaacagcctgactcctgccagccctatggaagttccttttatgcattggaggaaaaacatgttggcttttctcttgacgtgggagaaattgaaaagaaggggaaggggaagaaaagaaggggaagaagatcaamgaagraaagaagaaggggaagaaaagaaggggaagaagatcaaaacccaccatgccccaggctcaacggcgtgctgatggaagtggaagagcstgaagtcttacaggactcactggatagatgttattcgactccgtcaatgtactttgaactacctgactcattccagcactacagaagtgtgttttactcatttgaggaacagcacatcagcttcgccctttacgtggacaataggttttttactttgacggtgacaagtctccacctggtgttccagatgggagtcatattcccacaataagcagcccttastaakccgagagatgtcattcctgcaggcaggacctataggcamgtgaagatttgaatgaaagtacagttccatttggaagcccagacataggatgggtcagtgggcatggctctattcctattctcaaaccatgccagtggcaacctgtgctcagtctgaagacaatggacccacgttaggtgtgacacgttcacataactgtgcagcacatgccgggagtgatcagtcrgacattttaatttgaaccacgtatctctgggtagctacaaaattcctcagggatttcattttgcaggcatgtctctgagcttctatacctgctcaaggtcaktgtcatctttgtgtttagctcatccaaaggtgttaccctggtttcaatgaacctaacctcattctttgtgtcttcagtgttggcttgttttagctgatccatctgtaacacaggagggatccttggctgaggattgtatttcagaaccaccaactgctcttgacaattgttaacccgctagrctcctttggttagagaagccacagtccttcagcctccaattggtgtcagtacttaggaagaccacagctagatggacaaacagcattgggaggccttagccctgctcctctcrattccatcctgtagagaacaggagtcaggagccgctggcaggagacagcatgtcacccaggactctgccggtgcagaatatgaacaaygccatgttcttgcagaaaacgcttagcctgagtttcataggaggtaatcaccagacaactgcagaatgtrgarcactgagcaggacagctgacctgtctccttcacatagtccatrtcaccacaaatcacacaacaaaaaggagargagatattttgggttcaaaaaaagtaaaaagataatgtagctgcatttctttagttattttgarccccaaatatttcctcatctttttgttgttgtcatkgatggtggtgacatggacttgtttatagaggacaggtcagctgtctggctcagtgatctacattctgaagttgtctgaaaatgtcttcatgattaaattcagcctaaacgttttgccgggaacactgcagagacaatgctgtgagtttccaacctyagcccatctgcgggcagagaaggtctagtttgtccatcascattatcatgatatcaggactggttacttggttaaggaggggtctaggagatctgtcccttttagagacaccttacttataatgaagtatttgggagggtggttttcaaaattagaaatgtcctgtattccratgatcatcctgtaaacattttatcatttattaatcatccctgcctgtgtctattattatattcatatctctacgctggaaactttctgcctcaatgtttactgtgcctttgtttttgctagtgtgtgttgttgaaaaaaaaaacattctctgcctgagttttaatttttgtccaaagttattttaatctatacaattaaaagcttttgcctatcaaaaaaaaaaaaaaaaaaaaaaaaaaaaaaaaagcggacgcgtgggc

SEQ ID NO: 29 - DNA, 3735 bp, Homo sapiens
  SITE (110): n equals a,t,g, or c
  SITE (3690): n equals a,t,g, or c
  SITE (3716): n equals a,t,g, or c
ctgctgttcgctggctgggctccgcagcaggcttggccagcsgctgacgggtcggcgggcgggtttgtgtgaacaggcacgcagctgcagattttattctggtagtgcanccctctcaaaggttgaaggaactgatgtaacagggattgaagaagtagtaattccaaaaaagaaaacttgggataaagtagccgttcttcaggcacttgcatccacagtaaacagggataccacagctgtgccttatgtgtttcaagatgatccttaccttatgccagcatcatctttggaatctcgttcatttttactggcaaagaaatccggggagaatgtggccaagtttattattaattcataccccaaatattttcagaaggacatagctgaacctcatataccgtgtttaatgcctgagtactttgaacctcagatcaaagacataagtgaagccgccctgaaggaacgaattgagctcagaaaagtcaaagcctctgtggacatgtttgatcagcttttgcaagcaggaaccactgtgtctcttgaaacaacaaatagtctcttggatttwttgtgttactatggtgaccaggagccctcaactgattaccattttcaacaaactggacagtcagaagcattggaagaggaaaatgatgagacatctaggaggaaagctggtcatcagtttggagttacatggcgagcaaaaaacaacgctgagagaatcttttctctaatgccagagaaaaatgaacattcctattgcacaatgatccgaggaatggtgaagcaccgagcttatgagcaggcattaaacttgtacactgagttactaaacaacagactccatgctgatgtatacacatttaatgcattgattgaagcaacagtatgtgcgataaatgagaaatttgaggaaaaatggagtaaaatactggagctgctaagacacatggttgcacagaaggtgaaaccaaatcttcagacttttaataccattctgaaatgtctccgaagatttcatgtgtttgcaagatcgccagccttacaggttttacgtgaaatgaaagccattggaatagaaccctcgcttgcaacatatcaccatattattcgcctgtttgatcaacctggagaccctttaaagagatcatccttcatcatttatgatataatgaatgaattaatgggaaagagattttctccaaaggacccggatgatgataagttttttcagtcagccatgagcatatgctcatctctcagagatctagaacttgcctaccaagtacatggccttttaaaaaccggagacaactggaaattcattggacctgatcaacatcgtaatttctattattccaagttcttcgatttgatttgtctaatggaacaaattgatgttaccttgaagtggtatgaggacctgataccttcagcctactttccccactcccaaacaatgatacatcttctccaagcattggatgtggccaatcggctagaagtgattcctaaaatttggaaagatagtaaagaatatggtcatactttccgcagtgacctgagagaagagatcctgatgctcatggcaagggacaagcacccaccagagcttcaggtggcatttgctgactgtgctgctgatatcaaatctgcgtatgaaagccaacccatcagacagactgctcaggattggccagccacctctctcaactgtatagctatcctctttttaagggctgggagaactcaggaagcctggaaaatgttggggcttttcaggaagcataataagattcctagaagtgagttgctgaatgagcttatggacagtgcaaaagtgtctaacagcccttcccaggccattgaagtagtagagctggcaagtgccttcagcttacctatttgtgagggcctcacccagagagtaatgagtgattttgcaatcaaccaggaacaaaaggaagccctaagtaatctaactgcattgaccagtgacagtgatactgacagcagcagtgacagcgacagtgacaccagtgaaggcaaatgaaagtggagattcaggagcagcaatggtctcaccatagctgctggaatcacacctgagaactgagatataccaatatttaacattgttacaaagaagaaaagatacagatttggtgaatttgttactgtgaggtacagtcagtacacagctgacttatgtagatttaagctgctaatatgctacttaaccatctattaatgcaccattaaaggcttagcatttaagtagcaacattgcggttttcagacacatggtgaggtccatggctcttgtcatcaggataagcctgcacacctagagtgtcggtgagctgacctcacgatgctgtcctcgtgcgattgccctctcctgctgctggacttctgcctttgttggcctgatgtgctgctgtgatgctggtccttcatcttaggtgttcatgcagttctaacacagttggggttgggtcaatagtttcccaatttcaggatatttcgatgtcagaaataacgcatcttaggaatgactaaacaagataatggcagtttaggctgcacaactggtaaaatgactgtagataaatgttgtaattagtgtacacgtttgtatttttgttaatatagccgctgccatagttttctaacttgaacagccatgaatgtttcatgtctcccttttttttttgtctatagctgttacctattttagtggttgaaatgagagctagtgatgacagaaggatgtggaatgtcttcttgacatcattgtgtattgctggtaatcaagttggtaacgactacttctagcagctcttaccactatgacttaagtggtcctggaaggcagtaagtggaggtttgcagcattcctgccttcatgagggcttctaccactgaccactttgcacgtacctggctcccagatttacttaggtaccccacgagtcgtccacataagcagcttcatctttaccttgccagagttgacaattatgggatactctagtctacttatacttgtgttcccatctgtctgccatcctctgaaggccaggacccagtcatacatccttagaaaccaaagtatggtttttgttttctcttggaatgtcaggtcttaaggcatttaattgagggacaaaaaaaaaaaaaagccgatatagtagctagctacttaagcatccatgggtattgctccatatcaaagcagatttgcaggacagaaagagtaaattagccttcagtcttggtttacagcttccaaggagagccttggccacctgaaatgttaactcggtcccttcctgtctctagttcatcagcacctgcagatgcctgactcttgttagccttactattcaatacagtccttagattcacggtatgcctcttcctatccaggcacctattctgaatcaccatgttgctctgcagctagagttgataggagaaaatccatttgggtagatggcctatgaatttgtagtagactttcaaaatgagtgatttgttagcttggtacttttaagtttgtggtacagatcctccaaacccatactctgagcaattaactgccttgaacatagagaaaattaaggcctcacaggatgagtctccattctctgtaaatgcttattttatcatagtctttagccnctactatgagtaaaatgttctcttcngccgggtgtggtgactcac

SEQ ID NO: 30 - DNA, 1667 bp, Homo sapiens
  SITE (1628): n equals a,t,g, or c
tagtaattcatttaactcctcttacatgagtagcgacaatgagtcagatatcgaagatgaagacttaaagttagagctgcgacgactacgagataaacatctcaaagagattcaggacctgcagagtcgccagaagcatgaaattgaatctttgtataccaaactgggcaaggtgccccctgctgttattattcccccagctgctcccctttcagggagaagacgacgacccactaaaagcaaaggcagcaaatctagtcgaagcagttccttggggaataaaagcccccagctttcaggtaacctgtctggtcagagtgcagcttcagtcttgcacccccagcagaccctccaccctcctggcaacatcccagagtccgggcagaatcagctgttacagccccttaagccatctccctccagtgacaacctctattcagccttcaccagtgatggtgccatttcagtaccaagcctttctgctccaggtcaaggaaccagcagcacaaacactgttggggcaacagtgaacagccaagccgcccaagctcagcctcctgccatgacgtccagcaggaagggcacattcacagatgacttgcacaagttggtagacaattgggcccgagatgccatgaatctctcaggcaggagaggaagcaaagggcacatgaattatgagggccctggaatggcaaggaagttctctgcacctgggcaactgtgcatctccatgacctcgaacctgggtggctctgcccccatctctgcagcatcagctacctctctaggtcacttcaccaagtctatgtgccccccacagcagtatggctttccagctaccccatttggcgctcaatggagtgggacgggtggcccagcaccacagccacttggccagttccaacctgtgggaactgcctccttgcagaatttcaacatcagcaatttgcagaaatccatcagcaaccccccaggctccaacctgcggaccacttagacctagagacattaactgaatagatctgggggcaggagatggaatgctgagggggtgggtgggggtgggaagtagcctatatactaactactagtgctgcatttaactggttatttcttgccagaggggaatgtttttaatactgcattgagccctcagaatggagagtctcccccgctccagttattggaatgggagaggaaggaaagaacagcttttttgtcaaggggcagcttcagaccatgctttcctgtttatctatactcagtaatgaggatgagggctaggaaagtcttgttcataaggaagctggagaactcaatgtaaaatcaaacccatctgtaatttcgagtgggtggagctcttgcttttggtacatgccctgaatccctcactccctcaagaatccgaaccacaggacaaaaaccacctactgggctctctcctaccctgccctcctcccttttttttacccctctcttttttattttttctttgctctttagaacccagtgaaaaataccagggtactggggtgcaactctttcttatgataggtcattagtgctttaagcaaaagatattagcagctttgactgcagcattagcaattaggraaaaaaaaaanwaaaaactcgagggggggcccggttacccaattcgccct

SEQ ID NO: 31 - DNA, 1408 bp, Homo sapiens
  SITE (1385): n equals a,t,g, or c
  SITE (1395): n equals a,t,g, or c
attacacacctgagcactgtgcctggcaagacctgtcttaatagattagagaaccactgatagatggtcagctttctgtagcagtgagaaccctacatttcaaatgtggatagcacctttgcggggaaacatcacttggcacatctgcattcttttttgacacagggtctcactctgttgcccaggctagagtgcatggcacgatcttagctcactgcaacctccacctcccaagttcaagcgattcttctgcctcagcctcctgagcagctgggatcacagacatgcgctaccatgcccagctaattttttgtattttttgtktgtttgtttttgtttktaagtagagacgggctttcaccacgttggscaggcaggtctcgaactcctgamctcaggtgatccacccacatctgcgttccaatatctttctcaacataatgatagccgtaattaatattttccagtacatttttatgcctttacacacgagagtggtagacagacacaaacccagatctgtctgactccaaagcccgtttgtcatcattccttttacggtatcctatagtggtatcctttacagaaagacagcttttacccaacaaagacttaacttcccaggatgccagaaggacaaagcgggattgcttttaagragraagttatcaagamcttattttataaatgagattagatagggaaaggcaatttatctttattaaaaactgaaaaggccagcatagggaaggaggtccttcggtggtctttttcagggaaatacttcagttgcttttattagaaacagatagtacctaaggttttgaggtaggwacagcttaaggcatgctaatgktcatgggtccttccatagtcattttkgtattttggttwacatttgagcaataggcagcccttcactgctgctggaytcattcctgccaytattacaggtgacagaggagacaggaggtatgtcttttctatttttawacatgctttatatttaacacaagctcttgggtatcttagataaacagaagttgcctagcactccttttagtgcattgaaccctttaacatttaagcaaaataataaacagtcttttgaggttccttaacaatgaaacgtgttcgagtggcagcagcggaatccatgcytcttctcctggagtgtgcaakagtccgtggtcctgagtatctcacacagatgtggcattttatgtgtgatgctctaattaaggccattggtacagaaccagattcagacgtcctctcagaaataatgcattcttttgcaaaggtgaatatttttctcttaaaaaatatgtataaggtggtatgttcatttattagtcttgctaaaaaaaaaaaaaaaaaacttngagggggggnccggtacccaatt

SEQ ID NO: 32 - DNA, 3186 bp, Homo sapiens
  SITE (24): n equals a,t,g, or c
  SITE (666): n equals a,t,g, or c
  SITE (682): n equals a,t,g, or c
  SITE (3181): n equals a,t,g, or c
  SITE (3184): n equals a,t,g, or c
gggaggtcgagaagccaataagtngtttttcattgaatcctgcattgcactctttgtttccttcatcatcaatgtctttgttgtctcagtstttgctgaagyrttttttgggraaaccaacgagcaggtggttgaagtctgtacaaataccagcagtcctcatgctggcctctttcctaaagataactcgacactggctgtggacatctacaaagggggtgttgtgctgggatgttactttgggcctgctgcactctacatttgggcagtggggatcctggctgcaggacagagctccaccatgacaggaacctattctggccagtttgtcatggagggattcctgaacctaaagtggtcacgctttgcccgagtggttctgactcgctctattgccatcatccccactctgcttgttgctgtcttccaagatgtagagcatctaacagggatgaatgactttytgaatgttctacagagcttacagcttccctttgctctcatacccatcctcacatttacgagcttgcggccagtaatgagtgactttgccaatggactaggctggcggattgcaggaggaatctggtcctatcatctgttccatcatatgtactttgtagtggwttatgtccgggacytaaggcatgtgscattatatgtggnggctgctgtggtcaancgtggcttatctgggctttgtgttctacttggrttggcaatgtttgattgcactgggcatgtccttcctggactgtgggcatacggtaagcatctctaaaggcctgctgacagaagaagccacccgtggctacgttaaataacactggattagtctgtcttctgcaggtagccatcagagccagtgtgtttctatggtttactgtgtgaacatagccaaaagtatgtgccgttgcacagactgtgtttatgactcaaccgttggttggaaaagactttgtttcatgtgtatttgaaagatggaattattttttccttcctgacctaaccttagaactggattagggtgggatctttgaaaagctgacatttgctgctatcattccaacactaaattcttaagtagttgcccaagggccagctcagtttatccttcggagagacaaggatatgcatgattcttaaccaggctatatgttaaaaaaaaattggaaaatgcaatacattttttattatacaaactacagaatgagtatgcaagttttatttatcaaaatgtaatggatttttaaaggctgagaaattttccttatacctaccttttcagttattttaattataccaaattatcaactagaatagcttcatccatatgaaatataaaatgaagagacacctagctctatcaggcttaggattctttgaacttatttccactttaatttctcagtggaagttaagaggggtgagaaaacaaagaaggggaaaaactgacaactaacaaaaccagcaccacatcgctaggtggtgcttactaattaccttctcaggattttcctcagattgaaaagcttatgaggatttcttgggagtcttaataacctgcctgttagtacagagctttcctgatgatatttactcttgagcacatgtggttgtaaaaccttaactttctttctccaggagggtggtgatagaaacagatggtagtatttatgaactgatgttctcgtgaaatgttgagggtggggagaaaagactttaagggaggagagccatctattttgttcctaaagccacctctcagcagaatcgtcatgtttttctgatgcaccgctctgcttcatgcccaagatgacttgcgaggcaatctcaggagctgtggacttaaccattgcaaagcacactgtctttctcagcgttctctgcaagtcagtaggtgttagtatggttgcaaagttcactgtctcagcaaagttgaactgggctacctctctacagctgtttcctcagagggaaaaatcttgagaccagatggtggagctctggagtcagaggaaatgggtgtcttcagcacaaagctgctgcttttacttcagccacttctgacatttttacataccgagcctgagattgtgtgattatctcaaatcaaatcactttgatggagataaataatcaaaactgttttatagtcattgatttggtgagaacagtaatggaaaatggtgttgaaggacttctcatttttggagctttccttccagagtcctggctgattggtgttcgctgttcatctgagcccccaaaagcattattactgatacttgcacacagtcaaaagcgcagactggatggatggtcttttataaggcatttaagggtacactactgtgtttcactgaccatacatttttcttagcccctcaagtaatatagcacagagttatgaatgacaattcccctaaccattcctcttcatatctgcctcttccccttaccatcgtaattctccaaactggtcataaaggcactctgtgaagatattggggactgacatcttaagctctcacctggctgcagtaggaaaggccaaactgacgacaaaaaaaaaattctttataaagatgatatggtaacatgtatctttgccctgggtctgggtgggtccagtcagtctcagatttacaagcatttaggagcctaggtaaaagctgctagtattcttttaaaagttacatttatgacttgcaatgatagaaaactccttccaattaaatggcattttataatattatgtgtgtacttcacagtgttaaaaataccctcatacgttattgcatttgatcttcacagaaagtgcattttaaccagtactctgggtgcaataaataatatgtagaaatttaagtcctccaattccagcatatccagtgagttttgacagtgtgtttatgtggaatgtttaaggatatacaattgtactttatataaattggttcttgttcttcttaaatgtgacatgaaataattgtgctgctacattatactggaaattaacaggggaaaagggaagagctcttggctcccttgaggttctgctagtggtgttaggagtggttacaactgagcttttagtaaccatttaaccgtatgtaaacttggtttctaattaaaaaaaaatttctttttccaaaaaaaaaaaaaaaaaaaaaaattnctngg

SEQ ID NO: 33 - DNA, 971 bp, Homo sapiens
  SITE (957): n equals a,t,g, or c
  SITE (964): n equals a,t,g, or c
cgcgtcggaactcggccgcgggacatccacggggcgcgagtgacacgcgggagggagagcagtgttctgctggagccgatgccaaaaaccatgcatttcttattcagattcattgttttcttttatctgtggggcctttttactgctcagagacaaaagaaagaggagagcaccgaagaagtgaaaatagaagttttgcatcgtccagaaaactgctctaagacaagcaagaagggagacctactaaatgcccattatgacggctacctggctaaagacggctcgaaattctactgcagccggacacaaaatgaaggccaccccaaatggtttgttcttggtgttgggcaagtcataaaaggcctagacattgctatgacagatatgtgccctggagaaaagcgaaaagtagttatacccccttcatttgcatacggaaaggaaggctatgcagaaggcaagattccaccggatgctacattgatttttgagattgaactttatgctgtgaccaaaggaccacggagcattgagacatttaaacaaatagacatggacaatgacaggcagctctctaaagccgagataaacctctacttgcaaagggaatttgaaaaagatgagaagccacgtgacaagtcatatcaggatgcagttttagaagatatttttaagaagaatgaccatgatggtgatggcttcatttctcccaaggaatacaatgtataccaacacgatgaactatagcatatttgtatttctactttttttttttagctatttactgtactttatgtataaaacaaagtcacttttctccaagttgtatttgctatttttcccctatgagaagatattttgatctccccaatacattgattttggtataataaatgtgaggctgttttgcaaacttaaaaaaaaawwaaaaaaactsgaggggggcccgtacccaantcgccgnatatgat

SEQ ID NO: 34 - DNA, 1792 bp, Homo sapiens
  SITE (1767): n equals a,t,g, or c
  SITE (1768): n equals a,t,g, or c
gaaccccctttctcctggtaaagggtaaggggggggataatgtttaccacaggtacgaaatagtcactttaacattgagacctctgcctcattgaattcaggttttttaagtacttgaaactcttcagattctccttattttagtttctttttacatttatgaagtagaaagcattgttttgtaaactgttttgaaaataaatagcctagtctcttatcctctttagcgtggattaaaggtgaagttctgcaaatgggagagtgttcacagtagatagctcagattgattgaacacatttgaggaagagactcctgcatgagataccagcatttttacaaatactttttatgtacattctttattttgtcattttgtcaaccctctccccaagcacatcttctttccttttactatgtctatgtagggaaaaacaaaacaaaaaattgcacttacgttacactcccaaaatgtgggtaatccgtgtctttcaaaaaacatttctgttttttgttttgttttggtcagtccattgcataagtgacaagtttgggtgcttgtggcacgtatgtatgaagcgggagggggatgasaattgcctgtccttcagtargctgtaaaagtaatttacatgtaagtaaaaagggaaaatagaatagatgccaaagtcatttattcagtccttagttttcttatgtggcattactgcatctgctagttagtgagaaagcaccctcagcttttactgctcccctccctgcctgccaacacacttgatgtgtgcaaacagccctcaagtatctgtcagatgacctatataaggtattgaataaggtattcttgtcagtttagaaatggactggataaaacttacttggttgtcattattttatctcatttgtcctgttacatgccctatgttaagataattatattgccactaataatcaagatgctaaatgagtattacaactggctaatatcattttttatatacaagggtatgtgtatatttggaattgrtatgagaaactcatttgtacccatttgagtgatattgcacaacaaacacagatayctacagactccgttttcattttctcgtgttctttatgataatgatctttgtagattggttatttctgtactttatctgtaataaactttgtagatcctgtgaaccattactttgcctaaatcacttgagacttgagtctttaataacaaagcatcaatattcactaaagtcaatctcttttgagtttctgtgacttggctagaagctcttgacactaagggattagtgttaattttccctgggggtgttccactagggcattactgtataatgacttgatgttgccacatagacttcaagatatataatattttgaggattttgttgattggcctatgttttattgcatagtgtgaaacgtgtaaagcttggttaacctgtatatagatagcttattgttgactagttatagtgtatttagggttgcctgtaatatttaagcttctttactgatgtgtgtgctggtaggaacatataatttttgtacattatatttactgagatgttgccttttttattttacaaatactttggaattccaatgtgttttttgcttccgtgaggattaatttggaaaggtttttaatgacattccactgatttcagattttgcttgagattgacttcaataaattgtcctgtatgttccaaaaaaaaattaaaaaactcgaggggggcccggtacccaanncgccggatatgatcgtaaacaatc

SEQ ID NO: 35 - DNA, 896 bp, Homo sapiens
  SITE (6): n equals a,t,g, or c
  SITE (8): n equals a,t,g, or c
  SITE (870): n equals a,t,g, or c
  SITE (877): n equals a,t,g, or c
agttgnanacaacaggacctgagtccttgggcagcaccagtaggttgccccytgcytcytgccagcytcacytgccacyttytgcccctytcgggatgccttcgcagacagagytyttcgctgcctgtggtggccaytctttgcttttggttytcttgccccttggcctccctttttgtccccgggcagccttgtgtgacctgcccttttccctcccttcctttccaggacaagcacgccgaggaggtgcggaaaaacaaggagctgaaggaagaggcctccaggtaaagcctagaggccaaagaactttccaggtcagccggacagctccagcagctccacgttccaggcagcctcgmccgccggctgcgctcccagcactggggtttggggggaggggggtggccaaggggcgtttcctctgcttttggtgtttgtacatgttaagaattgaccagtgaagccatcctatttgtttccggggaacaatgacggggtgggaraggggagaggagagagtttgggaaagggagatggagaagaactcaaggacattgcaaccctgcccggcgcagatctgattttcacatctctacctggacattgagcctcccaggcaccatgttgaggagagatgaaaaccagggcggtagaacttcagggtgaaggacagagtcctgggtggggcagcggctgcagggcgcaccagagaacccagccagagggggtgtgagtaccagtggtgttgcttccaccctgcagcaggtgggatgaggtctgtgtgtgtgtgtgaaccatcattttttgatcatcatgaccaatgaaacattgaaaaaaaaaaaaaaaactggaggggggcccgtacccaantcgccgnatagtgatcgtaaacaatc

SEQ ID NO: 36 - DNA, 912 bp, Homo sapiens
tcgacccacgcgtccggtcagccagtcgcatccagccatgacagccttctgctccctgctcctgcaagcgcagagcctcctacccaggaccatggcagccccccaggacagcctcagaccaggggaggaagacgaagggatgcagctgctacagacaaaggactccatggccaagggagctaggcccggggccakccgcggcagggctcgctggggtctggcctacacgctgctgcacaacccaaccctgcaggtcttccgcaagacggccctgttgggtgccaatggtgcccagccctgarggcagggaakgtcaacccacctgcccatctgtgctgaggcatgttcctgcctaccatcctcctccctccccggctctcctcccagcatcacaccagccatgcagccagcaggtcctccggatcacygtggttkggtggaggtctgtctgcactgggagcctcargarggctctgctccacccacttggctatgggagagccagcaggggttctggagaaaaaaactggtgggttagggccttggtccaggagccagttgagccagggcagccacatccaggcgtctccctaccctggctctgccatcagccttgaagggcctcgatgaagccttctctggaaccactccagcccagctccacctcagccttggccttcacgctgtggaagcagccaaggcacttcctcaccccytcagcgccacggacctytytggggagtggccggaaagctcccsggcctytggcctgcagggcagcccaagtcatgactcagaccaggtcccacactgagctgcccacactcgagagccagatatttttgtagtttttatkcctttggctattatgaaagaggttagtgtgttccctgcaataaacttgttcctgag

SEQ ID NO: 37 - DNA, 1382 bp, Homo sapiens
  SITE (787): n equals a,t,g, or c
aattcggcacgagcggaggcgagggaaactragggcgaaagttgtgtgtcgtgttggcaggagggcctagaagggaaagactgtctagtgggacaatgtcatattataaatttggaatgctgaatagaaaattatagattttgatattgaaggaaatgaagcgaagcytaaatgaaaattcagctcgaagtacagcaggctgtttgcctgttccgttgttcaatcagaaaaagaggaacagacagccattaacttctaatccacttaaagatgattcaggtatcagtaccccttctgacaattatgattttcctcctctacctacagattgggcctgggaagctgtgaatccagagttkgctcctgtaatgaaaacagtggacaccgggcaaataccacattcagtttctcgtcctctgagaagtcaagattctgtctttaactctattcaatcaaatactggaagaagccagggtggttggagctacagagatggtaacaaaaataccagcttgaaaacttggrataaaaatgattttaagcctcaatgtaaacgaacaaacttagtggcaaatgatggaaaaaattcttgtccaatgagttcgggagctcaacaacaaaaacaattaagaacacctgaacctcctaacttatctcgcaacaaagaaaccgagctactcagacaaacacattcatcaaaaatatctggctgcacaatgagagggctagacaaaaacagtgcactacagacacttaagcccaattttcaacaaaatcaatataaganacaaatgttggatgatattccagaagacaacaccctgaaggaaacctcattgtatcagttacagtttaaggaaaaagctagttctttaagaattatttctgcagttattgaaagcatgaagtattggcgtgaacatgcacagaaaactgtacttctttttgaagtattagctgttcttgattcagctgttacacctggcccatattattcgaagacttttcttatgagggatgggaaaaatactctgccttgtgtcttttatgaaatcgatcgtgaacttccgagactgattagaggccgagttcatagatgtgttggcaactatgaccagaaaaagaacattttccaatgtgtttctgtcagaccggcgtctgtttctgagcaaaaaactttccaggcatttgtcaaaattgcagatgttgagatgcagtattatattaatgtgatgaatgaaacttaagtagtgataaaaggaagtttagcataaattatagcagttttctgttattgcttaatttaccatctccatagttttatagctactattgtatttcacttgttgaattaaagtatttgaattcttttaaaaaaaaaa

SEQ ID NO: 38 - DNA, 872 bp, Homo sapiens
gggctacttcaaagccctgggccttatttcttcaggtaaaaaaatataaagtcagatctcatcccggctggccatgctgttagaccctttcatccttctcttctgcctcttctcaacagctgcccagtcctgtttggaattcatatacatacagttctaatactgatgtatttaccctcataagccactcaacccagaatcttatttgaattataatccagaaacatcaggtgacgtgtgagactactgtatgagaaagagacagtttaagggtcagtccaatggaaaaaagagttctcagagctttctttagcttattctcatcaaagagctttctctgcagaaggaacctactggttcctcctttccagtcctagaaatcctgacctagagtggcttaatcctgctagcacctctctctcgcactctggtgccaaatgactccaggaactgggccatgatgtggtgggaatgaccttaccctgagcatgtcactcatgcattgaacaacagctaagagcagagcttagagcttagagctgggccctgtaaggtgagaggaatcacatcctgcagaagtctgtcctgagaagcaggtactcctgtcacagcagagacacagtggatacctgagtaacaataatacaagacaggacgtgggmacagcaaaagatttgggtgtcagaagargccgagaacacttycaggcaggaacattcararttgttcttggaggaartaggcmcsaaggctgggcaggatttcmcggggcagagatggagcaagcaattgaaatgaaagccatggcatgggaaaaggagcactggccacagggagtgcaacgttgtgatgcaaggccactgtggagccat

SEQ ID NO: 39 - DNA, 812 bp, Homo sapiens
  SITE (794): n equals a,t,g, or c
  SITE (806): n equals a,t,g, or c
  SITE (810): n equals a,t,g, or c
ggcagaggctcaccccagcagagattgagggggaaccgtgatgaaatttttaagtattctgcttgatgataataattttyctcttatgttaatgttggctccgtttgggtgtttagcttttgaaaggagtatgaaaatgcggaatggggctttggggcttgaggaggtgtgatctctagtgtttaaaaaatttaattgcacaaatagaaataattcacccacattattgaaccccactaaagcatatcctttttgtccatattcctttcctgctgccctcgtgtgtaccattattactcagttgtgatttgagctcgttccacttaaagtcattcatagatacttttgcgtcgtgttkgaatatttattgaatttctattctgtgttttacttaattactttattatggaacctttacacaggtctggtgtacttgttctttgaaaagtcttatgttgaccaccatcactgagcatatagctttttccttatttccttgggataattacccgaagtggaaataccgaatcaaacttctgttttctttctttggcactattatataaattgttttccaaacaaggcatgtttacaatagacatttttcaaaatctgggtatttgtcctattttgctctctgtatgcagaattcagcggggtgccaagtcgttttctgtgtgggttgagagacaggctgtgcagcccactgttgcataggactaactactacaaatcatgctgagaccgagctatttttgctgcttagargctttgcagccttgagtaagtttcgncatctggaaacnttgnaa

SEQ ID NO: 40 - DNA, 1515 bp, Homo sapiens
  SITE (69): n equals a,t,g, or c
aattcggcacgagggaaattcaagcacttttcctaaaagaagggggaatggatgctgaaacaacacgtntcccacaaagggagcagacactgggcttgtgaagctgccccataccttccccacagaactggggtccggcctccctgacatgcagatttccacccagaagacagagaaggagccagtggtcatggaatgggctggggtcaaagactgggtgcctgggagctgaggcagccaccgtttcagcctggccagccctctggaccccgaggttggaccctactgtgacacacctaccatgcggacactcttcaacctcctctggcttgccctggcctgcagccctgttcacactaccctgtcaaagtcagatgccaaaaaagccgcctcaaagacgctgctggagaagagtcagttttcagataagccggtgcaagaccggggtttggtggtgacggacctcaaagctgagagtgtggttcttgagcatcgcagctactgctcggcaaaggcccgggacagacactttgctggggatgtactgggctatgtcactccatggaacagccatggctacgatgtcaccaaggtctttgggagcaagttcacacagatctcacccgtctggctgcagctgaagagacgtggccgtgagatgtttgaggtcacgggcctccacgacgtggaccaagggtggatgcgagctgtcaggaagcatgccaagggcctgcacatagtgcctcggctcctgtttgaggactggacttacgatgatttccggaacgtcttagacagtgaggatgagatagaggagctgagcaagaccgtggtccaggtggcaaagaaccagcatttcgatggcttcgtggtggaggtctggaaccagctgctaagccagaagcgcgtgaccgaccagctgggcatgttcacgcacaaggagtttgagcagctggcccccgtgctggatggtttcagcctcatgacctacgactactctacagcgcatcagcctggccctaatgcacccctgtcctgggttcgagcctgcgtccaggtcctggacccgaagtccaagtggcgaagcaaaatcctcctggggctcaacttctatggtatggactacgcgacctccaaggatgcccgtgagcctgttgtcggggccaggtacatccagacactgaaggaccacaggccccggatggtgtgggacagccaggyctcagagcacttcttcgagtacaagaagagccgcagtgggaggcacgtcgtcttctacccaaccctgaagtccctgcaggtgcggctggagctggcccgggagctgggcgttggggtctctatctgggagctgggccagggcctggactacttctacgacctgctctaggtgggcattgcggcctccgcggtggacgtgttcttttctaagccatggagtgagtgagcaggtgtgaaatacaggccttcactccgttaaaaaaaaaaaaaaaaaaaaaaaaaaaaaaaaaaaaa

SEQ ID NO: 41 - DNA, 704 bp, Homo sapiens
aagatggtggcgcccagagcttcgctctatgctgctcccctgagagaggcgtttccatcaaccagttttgcaaggagttcaatgagaggacaaaggacatcaaggaaggcattcctctgcctaccaagattttagtgaagcctgacaggacatttgaaattaagattggacagcccactgtttcctacttcctgaaggcagcagctgggattgaaaagggggcccggcaaacagggaaagaggtggcaggcctggtgaccttgaagcatgtgtatgagattgcccgcatcaaagctcaggatgaggcatttgccctgcaggatgtacccctgtcgtctgttgtccgctccatcatcgggtctgcccgttctctgggcattcgcgtggtgaaggacctcagttcagaagagcttgcagctttccagaaggaacgagccatcttcctggctgctcagaaggaggcagatttggctgcccaagaagaagctgccaagaagtgacccttgccccaccaactcccagatttcaaaggaggtagttgcaaaagctgtgcccaaggggaggaaggaggtcacaccaatatgatgatggttttcatgactttgaatgatatatttttgtacatctagctgtatcgaggcatcaggcctgaataaacatcctttcttaaaaaaaaaaaaaaaaaaaaaaaaaaaaaaaaaaaa

SEQ ID NO: 42 - DNA, 1094 bp, Homo sapiens
  SITE (196): n equals a,t,g, or c
  SITE (226): n equals a,t,g, or c
  SITE (302): n equals a,t,g, or c
  SITE (596): n equals a,t,g, or c
  SITE (952): n equals a,t,g, or c
ggcagctttcttacaaacccatccttctgaaatgttgcttcaaattcatcctctgctccccagtcccactattccacacatactgttactgtttctttatcctactttctcaattttggaacatagttgcagttactgcattgaatacctgtgggtttgcctgttgttctgtctgtctctgtggttcttgtaatantggatcccagagataaaatggacagttgtnatgcacagttaattcagaaactagaccttacttgctgtgtgaaataccaactaaattctcagtgaactcagctganctttatctccttttgtttccccaatttataatttcagttcaggcccagaaagatggaatcccagctaagaaatacaagttacaccctgtactagcagcccatgtgtgcatgttctttaagtgctcttgcagctatgtcatttatattgatttccctgtattattataagcaaagcaaatttgaggaaaaaaacccataataccacacctcatttttttcaagtaatagggtcataagtctcatyctycatataatatgttgagtatgcagtatattatgtgttaggctctgganaggcagaggttagatcatgtwacagatcatatckgattaggcagataaacagtattttaaccttttccttattatatgtaacttgctttcaggttttttaatgttactattatgtctttaatatattatctttatttgtacttttgtatacagagtgattttccttttttaaaaaaaattgtgtctttaggatggattccaaagatgtggaatcagtaggtttaaggaatatggatattttggctggcaaggtggctcacacctgtaatcccagcactttgggaggctgaggtgggtggatcacctgaagtcaggagttcgagaccagcctgaccaacatggcgaaaccctgtttntactaaagacacacwwaaaattrgccagtggtggtggcatgtgcttgtagtcccacttagctactcgagaggctgaggcaggagaatcgcttgaacccgggaggcagaggttgcagtgaggcaagatggcacctctacactc

SEQ ID NO: 43 - DNA, 1821 bp, Homo sapiens
  SITE (1801): n equals a,t,g, or c
tggcttaggccatcacccttcccttggctggaactactggacagacccttttgagatgtgcctgtggtgctgtggagatgtgtgtagtggtcttagctctttgttgagcttgtgtgtgtgttgtgtagtcttagctgtatgctgaaattgggcgtgtgttggagggcttcttagctctttggtgagattgtatttctatgtgtttgtatcasctgaatgttgctggaaataaaaccttggtttgtmaaggctcytttttgtgggaagtaagtaggggaaaaggtctttgagggttcctaggctcctttgtacaacaggaaaatgcctcaaagccttgcttcccagcaacctggggctggttcccagtgcctggtcctgccccttcctggttcttatctcaaggcagagcttctgaatttcaggccttcattccagagccctcttgtggccaggccttcctttgctggaggaaggtacacagggtgaagctgatgctgtacttgggggatctccttggcctgttccaccaagtgagagaaggtacttactcttgtacctcctgttcagccaggtgcattaacagacctccctacagctgtaggaactactgtcccagagctgaggcaaggggatttctcaggtcatttggagaacaagtgctttagtagtagtttaaagtagtaactgctactgtatttagtggggtggaattcagaagaaatttgaagaccagatcatgggtggtctgcatgtgaatgaacaggaatgagccggacagcctggctgtcattgctttcttcctccccatttggacccttctctgcccttacatttttgtttctccatctaccaccatccaccagtctatttattaacttagcaagaggacaagtaaagggccctcttggcttgattttgcttctttctttctgtggaggatatactaagtgcgactttgccctatcctatttggaaatccctaacagaattgagttttctattaaggatccaaaaagaaaaacaaaatgctaatgaagccatcagtcaagggtcacatgccaataaacaataaattttccagaagaaatgaaatccaactagacaaataaagtagagcttatgaaatggttcagtaaggatgagtttgttgttttttgttttgttttgttttgkttttttaaagacggagtctcgctctgtcactcaggctggagtgcagtggtatgatcttggctcactgtaacctccgcctcccgggttcaagccattctcctgcctcagtctcctgagtagctgggattacaggtgcgtgccaccatgcctggctaatttttgtgtttttagtagagacagggtttcaccatgttggtcgggctggtctcaaactcctgacctcttgatccgcctgccttggcctcccaaagtgatgggattacagatgtgagccacccgtgccctagccaaggatgagatttttaaagtatgtttcagttctgtgtcatggttggaagacagagtaggaaggatatggaaaaggtcatggggaagcagaggtgattcatggctctgtgaatttgaggtgaatggttccttattgtctaggccacttgtgaagaatatgagtcagttattgccagccttggaatttacttctctagcttacaatggaccttttgaactggaaaacaccttgtctgcattcactttaaaatgtcaaaactaatttttataataaatgtttattttcacattgaaaaaaaaaaaaaatttaaaaacycggggggggcccsgwaccccattngcccctaagggggggggttt

SEQ ID NO: 44 - DNA, 1024 bp, Homo sapiens
ggggcacagttgaagaagcgaccgagggactgggagtcgttagtgaggatgacgcggcatggcaagaactgcaccgcagggccgtctacacctaccacgagaagaagaaggacacagcggcctcgggctatgggacccagaacattcgactgagccgggatgccgtgaaggacttcgactgctgttgtctctccctgcagccttgccacgatcctgttgtcaccccagatggctacctgtatgagcgtgaggccatcctggagtacattctgcaccagaagaaggagattgcccggcagatgaaggcctacgagaagcagcggggcacccggcgcgaggagcagaaggagcttcagcgggcggcctcgcaggaccatgtgcggggcttcctggagaaggagtcggctatcgtgagccggcccctcaaccctttcacagccaaggccctctcgggcaccagcccagatgatgtccaacctgggcccagtgtgggtcctccaagtaaggacaaggacaaagtgctgcccagcttctggatcccgtcgctgacgcccgaagccaaggccaccaagctggagaagccgtcccgcacggtgacctgccccatgtcagggaagcccctgcgcatgtcggacctgacgcccgtgcacttcacaccgctagacagctccgtggaccgcgtggggctcatcacccgcagcgagcgctacgtgtgtgccgtgacccgcgacagcctgagcaacgccaccccctgcgctgtgctgcggccctctggggctgtggtcaccctcgaatgcgtggagaagctgattcggaaggacatggtggaccctgtgactggagacaaactcacagaccgcgacatcatcgtgctgcagcggggcggtaccgsttcgcgggctccggagtgaagctgcaagcggagaaatcacggccggtgatgcaggcctgagtgtgtgcgggagaccaaataaaccggcttgggtgcgcaaaaaaaaaaaaaaaaaaaaaaaaaaaaaaaaaa

SEQ ID NO: 45 - DNA, 983 bp, Homo sapiens
  SITE (976): n equals a,t,g, or c
cgacacggctgcgagaagacgacagaagggcccgaccgcgagccgtccaggtctcagtgctgtgccccccccagagcctagaggatgtttcatgggatcccagccacgccgggcataggagcccctgggaacaagccggagctgtatgaggaagtgaagttgtacaagaacgcccgggagagggagaagtacgacaacatggcagagctgtttgcggtggtgaagacaatgcaagccctggagaaggcctacatcaaggactgtgtctcccccagcgagtacactgcagcctgctcccggctcctggtccaatacaaagctgccttcaggcaggtccagggctcagaaatcagctctattgacgaattctgccgcaagttccgcctggactgcccgctggccatggagcggatcaaggaggaccggcccatcaccatcaaggacgacaagggcaacctcaaccgctgcatcgcagacgtggtctcgctcttcatcacggtcatggacaagctgcgcctggagatccgcgccatggatgagatccagcccgacctgcgagagctgatggagaccatgcaccgcatgagccacctcccacccgactttgagggccgccagacggtcagccagtggctgcagaccctgagcggcatgtcggcgtcagatgagctggacgactcacaggtgcgtcagatgctgttcgacctggagtcagcctacaacgccttcaaccgcttcctgcatgcctgagcccggggcactagcccttgcacagaagggcagagtctgaggcgatggctcctggtcccctgtccgccacacaggccgtggtcatccacacaactcactgtctgcagctgcctgtctggtgtctgtctttggtgtcagaacttttgggccgggcccctccccacaataaagatgctctccgaccttcaaaaaaaaaaaaaaaaaaaaagrkgsggccggtccccantcccccc

SEQ ID NO: 46 - DNA, 2421 bp, Homo sapiens
ccggctgatcgctgccgctccgccaatacaatagagccakccactaccagcagcctggccctcttcctccttctccagagagaccaatccagccgaactcggggtttgcctgaggagaaggaggaagtgaccatggacacaagtgaaaacagacctgaaaatgatgttccagaacctcccatgcctattgcagaccaagtcagcaatgatgaccgcccggagggcagtgttgaagatgaggagaagaaagagagctcgctgcccaaatcattcaagaggaagatctccgttgtctcagctaccaagggggtgccagctggaaacagtgacacagaggggggccagcctggtcggaaacgacgctggggagccagcacagccaccacacagaagaaaccttccatcagtatcaccactgaatcactaaagagcctcatccccgacatcaaacccctggcggggcaggaggctgttgtggatcttcatgctgatgactctcgcatctctgaggatgagacagagcgtaatggcgatgatgggacccatgacaaggggctgaaaatatgccggacagtcactcaggtagtacctgcagagggccaggagaatgggcagagggaagaagaggaagaagagaaggaacctgaagcagaacctcctgtacctccccaggtgtcagtagaggtggccttgcccccacctgcagagcatgaagtaaagaaagtgactttaggagataccttaactcgacgttccattagccagcagaagtccggagtttccattaccattgatgacccagtccgaactgcccaggtgccctccccaccccggggcaagattagcaacattgtccatatctccaatttggtccgtcctttcactttaggccagctaaaggagttgttggggcgcacaggaaccttggtggaagaggccttctggattgacaagatcaaatctcattgctttgtaacgtactcaacagtagaggaagctgttgccacccgcacagctctgcacggggtcaaatggccccagtccaatcccaaattcctttgtgctgactatgccgagcaagatgagctggattatcaccgaggcctcttggtggaccgtccctctgaaactaagacagaggagcagggaataccacggcccctgcaccccccacccccacccccggtccagccaccacagcacccccgggcagagcagcgggagcaggaacgggcagtgcgggaacagtgggcagaacgggaacgggaaatggagcggcgggagcggactcgatcagagcgtgaatgggatcgggacaaagttcgagaagggccccgttcccgatcaaggtcccgtraccgccgccgcaaggaacgtgcgaagtctaaagaaaagaagagtgagaagaaagagaaagcccaggaggaaccacctgccaagctgctggatgaccttttccgaaagaccaaggcagctccctgcatctattggctcccactgactgacagccagatcgttcagaaagaggcagagcgggccgaacgggccaaggagcgggagaagcggcgaaaggagcaagaagaagaagagcaaaaggagcgggagaaggaagccgagcgggaacggaaccgacagctggagcgagagaaacgtcgggagcacagtcgggagagggacagggagagagagagagaaagggagcgggacaggggggaccgagatcgggatagggaaagggaccgagaacgaggcagggaaagggatcgcagggacaccaagcgccacagcagaagccggagtcggagcacacctgtgcgggaccggggtgggcgccgctagctgggaaaacactagagctgcaggtaccagccactcggccccagggggttatggccacagagggataggcacagtctccaccaccctggagccaagggtctttcacatcacctatccctacatacataccaaatggaaaagtggccatccttttccccccaaacacacccccttaacctatctcttgggacttagcccgaccctccctctcatttcccattaagtctgagaggcaagagctaggttaggcaaggaggtggttggccagagatggggaacagccaggtgccccagtcctctgatttttcctccatcctgcttaccacctccctgggtacttacagccttctcttgggaacagccggggccaggactgggtcacctatgagctgaatcagcatctcctcctgagtcccagggcccctgcagttcccagtctcttctgtcctgcagcccttgcctctttcccacaggttccactttatatccaccttttccttttgttcaatttttatttttattttttttattattaaatgatgtggtctatggaaaaaaaaataaaaatctgacttagtttta

SEQ ID NO: 47 - DNA, 840 bp, Homo sapiens
ctcaaactcctgagctgaagcgatctacctgcctcagctaggattacaggtgtgagccaccgcacccaacctcaataagcktatttgataaaakatatgcaagctccctttatkcacttttcattcagaatgtttagtaatttgtattgtttttcagattttcagcccaatatatctccytgcccactgtgtcactgtattctacctawacatcatcacgtgtttctgctattggctgtatgatggaacactgcggctcattttcctgaaaactgccgatagtgcatagartgctgggatggaaaccagaarctttgaattcaagccttggttctgccttgtttttgcttgggtggccttgagtcagccacataccttttaaaatctcaatttattagaaattattccaaatcaaaatcaaatgagaaggtatatacaaaagtgctttatcccacaataaactattcaagagagagcaaaggagaggacatttactcaacacctcctaaaaggcagccagtgaaattaggcattttatttaatcctcctggcaactctgagagtaaagcattattaatcccattttggctgtttaaagaaattatttgcactagattccagctgtagtttagyttcagaaaaaaaaatcctgagatgtgaattcacagctttctgggtttaaagcccaagctctatcacatcatgctattattgttacattactgctagttctatgaaaagaaatactaatttatgaaatacatcttatccaaaaaaaaaaaaaaaaaactgggagggggggcccgtacccaaatcgccggatagtgatcgtaaacaatc

SEQ ID NO: 48 - DNA, 2432 bp, Homo sapiens
  SITE (593): n equals a,t,g, or c
  SITE (2049): n equals a,t,g, or c
ggcacgaggcccggaacgctgaggaagggcccgtcccgccttccccggcgcgccatggagccccgggcggttgcagaagccgtggagacgggtgaggaggatgtgattatggaagctctgcggtcatacaaccaggagcactcccagagcttcacgtttgatgatgcccaacaggaggaccggaagagactggcggastgctggtctccgtcctggaacagggcttgccaccctcccaccgtgtcatctggctgcagagtgtccgaatcctgtcccgggaccgcaactgcctggacccgttcaccagccgccagagcctgcaggcaytagcctgytatgytgacatctctgtctctgaggggtccgtcccagagtccgcagacatggatgttgtactggagtccctcaagtgcctgtgcaacctcgtgctcagcagccctgtggcacagatgctggcagcagaggcccgcctagtggtgaagctcacagagcgtgtggggctgtaccgtgagaggagcttcccccacgatgtccagttctttgacttgcggctcctcttcctgctaacggcactccgcaccgatgtgcgccanagctgtttcaggagctgaaaggagtgcgcctgctaactgacacactggagctgacgctgggggtgactcctgaagggaaccccccacccacgctccttccttcccaagagactgagcgggccatggagatcctcaaagtgctcttcaacatcaccctggactccatcaagggggaggtggacgaggaagacgctgccctttaccgacacctggggacccttctccggcactgtgtgatgatcgctactgctggagaccgcacagaggagttccacggccacgcagtaascctcctggggaacttgcccctcaagtgtctggatgttctcctcaccctggagccacatggagactccacggagttcatgggagtgaatatggatgtgattcgtgccctcctcatcttcctagagaagcgtttgcacaagacacacaggctgaaggagagtgtagctcccgtgctgagcgtgctgactgaatgtgcccggatgcaccgcccagccaggaagttcctgaaggcccaggtgctgccccctctgcgggatgtgaggacacggcctgaggttggggagatgctgcggaacaagcttgtccgcctcatgacacacctggacacagatgtgaagagggtggctgccgagttcttgtttgtcctgtgctctgagagtgtgccccgattcatcaagtacacaggctatgggaatgctgctggccttctggctgccaggggcctcatggcaggaggcggcccgagggcagtactcagaggatgaggacacagacacagatgagtacaaggaagccaaagccagcataaaccctgtgaccgggagggtggaggagaagccgcctaaccctatggagggcatgacagaggagcagaaggagcacgaggccatgaagctggtgaccatgtttgacaagctctccaggaacagagtcatccagccaatggggatgagtccccggggtcatcttacgtccctgcaggatgccatgtgcgagactatggagcagcagctctcctcggaccctgactcggaccctgactgaggatggcagctcttctgctcccccatcaggactggtgctgcttccagagacttccttggggttgcaacctggggaagccacatcccactggatccacacccgcccccacttctccatcttagaaaccccttctcttgactcccgttctgttcatgatttgcctctggtccagtttctcatctctggactgcaacggtcttcttgtgctagaactcaggctcagcctcgaattccacagacgaagtactttcttttgtctgcgccaagaggaatgtgttcagaagctgctgcctgagggcagggcctacctgggcacacagaagagcatatgggagggcaggggtttgggtgtgggtgcacacaaagcaagcaccatctgggattggcacactggcagagcmantgtkttggggtatgtgctgcacttcccagggagaaaacctgtcagaactttccatacgagtatatcagaacacacccttccaaggtatgtatgctctgttgttcctgtcctgtcttcactgagcgcagggctggaggcctcttagacattctccttggtcctcgttcagctgcccactgtagtatccacagtgcccgagttctcgctggttttggcaattaaacctccttcctactggtttagactacacttacaacaaggaaaatgcccctcgtgtgaccatagattgagatttataccacataccacacatagccacagaaacatcatcttgaaataaagaagagttttggacaaaaaaaaaaaaaaaaaaaaaaaaaaaa

SEQ ID NO: 49 - DNA, 1742 bp, Homo sapiens
  SITE (35): n equals a,t,g, or c
  SITE (570): n equals a,t,g, or c
gtcctgcaggagctgcacgcggccgaggtgcgcangaacaaggagcagcgagaagagatgtcgggctaagggcccggsacgrgsggcgcccatcctgcgacggaacacgttcgggttttggttttgtttcgttcacctctgtctagatgcaacttttgttcctcctcccccaccccagcccccagcttcatgcttctcttccgcactcagccgccctgccctgtcctcgtggtgagtcgctgaccacggcttcccctgcaggagccgccgggcgtgragacgcggtccctcggtgcagacaccaggccgggcgcggctgggtcccccgggggccctgtgagagaggtggyggtgaccgtggtaaacccagggcggtggcgtgggatcrcgggtccttacgctgggctgtctggtcagcacgtgcaggtcagggcaggtcctctgagccggcgcccctggccagcaggcgaggctacagtacctgctgtctttccagggggaaggggctccccatgaggraggggcgacgggggaggggggtgatggtgcctgggaagcctgcktgtgcanccggtgcttgttgaactggcaggcgggtgggtgggggctgcagctttccttaatgtggttgcacaggggtcctctragaccacctggcgtgaggtggacaccctgggccttcctggaagcctgcagttgggggcctgccctgagtctgctggggagtgggcattctctgccagggacccatgagcaggctgcatggtctagaggttgtgggcagcatggacagtcccccactcagaagtgcaagagttccaaagagcctctggcccaggcccctccgtgggacagccccgccgcccctccccaccagggctttgcagatgtccttgaaagacccaccctagagccctttggagtgctggcccctcctgtgccctctgccctggtggaagcggcascacaagtcctcctcagggagccccaagggggattttktgggaccgctgcccacagatccaggtgttggaagggcagcgggtaaggttcccaagccagccccaacacccttcccacttggcacccagagggggctgtgggtggaggcctgactccaggcctctcctgcccacaccctctgggctgagttccttctttcccttggacgcccagtgctggccttggaggacggtcagctggaggatggcggtgggggaggctgtctttgtaccactgcagcatcccccacttctccacggaagccccatcccaaagctgctgcctggccccttgctgtaaagtgtgaagggggcggctgagttctcttaggacccagagccagggccctcaacttccatcctgcgggaggccttggccgggcactgccagtgtcttccagagccacacccagggaccacgggaggatcctgacccctgcagggctcaggggtcagcagggacccactgccccatctccctctccccaccaagacagccccagaaggagcagccagctgggatgggaacccaaggctgtccacatctggcttttgtgggactcagaaagggaagcagaactgagggctgggatattcctcatggtggcagcgctcatagcgaaagcctactgtaatatgcacccatctcatccacgtagtaaagtgaacttaaaaattcaatcaaatgaacaattaaataaacacctgtgtgtttaagaaaaaaaaaaaaaaaaaactgcg

SEQ ID NO: 50 - DNA, 1487 bp, Homo sapiens
  SITE (1486): n equals a,t,g, or c
ggcacgagcctccgcgaactgtggagtcggcggagggctggaatcagcgtgggctccaggtcgctggcagccgggtggcagaactcttccgaggctccttgggaagaagctacacccgagggagccggatgggcctcgaaaacctggcccgctctggttctgtaccattgcaaggggaaccgtaaactgagcttttctaacgtgggtttctgccaagtacttttccagctgcccccttccccccagcacacaggagagcctctgtgtagccagcgcttgacagtcgttaggtaggttgtactgtgtagggaggagctcaagatcatgaatggttgtcacaggagaaagcggttgcatctttgcaaaactatatacctgctgtggtttgtgttttcttttctgctgagtaatgaagttgtaagttcacactggcacattctcagggctgtgcagattatttgcactttatttcataggtgrataagtgctttttagctttctttgtatattgagttgcttttgaattgcttcccatatttttatttcatacaaactgaacaattgtggcccctctattttatttataaaggttcagtgtatctttgcctgcctacatcaatctgcaagggagttgcagaaagcctcatgttcatcgagccgtgagtcacaaccaatttctaagctgttataacaaaaaagtgtttgctttttttcacaagtaactttaaaagtgtagtttagaaagaaaacattttcaataaaaagacactacattaatcctggatgcttgcaaatcctaaaatmtattcctcctctagcgttgcacagctctgtgttgtatacacagactagctttaaaatttgtcacataccactttacctttacttttatgtatcattcccccgacttccttactgcaggtgtgggcaagaaaacttttcctttaacacttttcaacagcgggcataaaattctgcagctgaggtcttgaagaatgcagatgggtacagtatgtgttggagctcacagtgtgtattgactaacctagttccttttttgctttttttggtattgtcttgttaaaagtgactcccaggtagcaactctcttttttaagggtgggaacgaaagggacgtaggaagaatagatctagattatttaacagtcttcgatagagtttgaaagctttcttcttcattcaattttgggcaaaatactgcctctgcatttgttcataacaaaaagattagattaataagtagcttttgttggtggaaattaccagctctataagtcacccttggtggttcatggacctctgattagcttgggttttgcagtctcattgccacatgtatatgtggagccaatggccttttggtgctcagctgtttacgtctgactccttgacttctttggtacagtgatggagtcagatctcattaagtgtgattctccatggatataaccagccccaaaaaaang

SEQ ID NO: 51 - DNA, 1328 bp, Homo sapiens
ggcacgagctcgtgccgaattcggcacgagagaagatttgaagaagccagatccagcttccctgcgggctgcttcttgtggggaagggaaaaagaggaaggcctgtaagaactgcacctgtggccttgccgaagaactggaaaaagagaagtcaagggaacagatgagctcccaacccaagtcagcttgtggaaactgctacctgggcgatgccttccgctgtgccagctgcccctaccttgggatgccagccttcaaacctggggaaaaggtgcttctgagtgatagcaatcttcatgatgcctaggaggttcctgacatgggacccatctgctcctccagccaactcctgtccctcacatcccaccatggtggctcctcccacctcctctggatttgttcactctgagatctgtttgcagagtgggtgcttagcagacagagtgaagctggctggggggcacagtggtgtgtagtgctgctgtgtatcaaaagaccaaggtattatgggacctggtttcagaatgggatgggtttcttcacctcatgttaagagaagggagtgtgtcctgaagaagcccttcttctgatgttaaaatgctgaccagaacgctcttgagcccaggcatcgttgagcattaacactctgtgacagagctgcagacccctgccttgagtctcatctcagcaatgctgccaccctcttgtctttcagagttgttagtttactccattctttgtgacacgagtcaagtggctcacaacctcctcagggcaccagaggactcactcactggttgctgtgatgatatccagtgtccctctgcccccttccatccccaaccacatttgactgtagcattgcatctgtgtcctgttgtcatttatgttaaccttcaggtattaaacttgctgcatatcttgacatatcttgagattctgcatgtcttgtaaagagaggggatgtgcatttgtgtgtgatgttggatagtcatccacgctcagtttggaccattggaggaacttagtgtcacgcacaaatggggctattcctacgcttagaatagggcttgtctgcccactttagaagagtcccaggttggtgagcatttagagggaagcagggcagaactctgaacgacaatacgtctctctgagcagagacccctttgttcttgttatccacccatatggacttggaatcaatcttgccaaatatttggagagattgtgtggatttaagagacctggatttttatattttaccagtaaataaaagttttcattgatatctgtccttgaaaaaaaaaaaaaaaaaaaaaactcga

SEQ ID NO: 52 - DNA, 1856 bp, Homo sapiens
gaattcggcacgagctctgcaacattgcaaatgaacttgcagccgagggttccgctgccccctagattaaattccccgggctgaaactgagttgcagatttacaatatcatattttaaattgctgtcttcaattaaaccatttatgaccataactaattttcaggatgtcgatgcatgcttttccaggccttccttctttgtacaaaagtaaatgtccataaagcgtttcacttatattcttcaaacatgatgctaatttaaattaattacttcctatgatatgttattattcctatgattttgccactgttattagttctctcaaaaatacatctagggaagaggattattttaagtratttgattatctttctatctcttttatttatttctcatttacttaagaaattcgttccattggttggcattgatacagtaaatttgtaaatgaggagacaatataaaaaatctaaattacttgtgcttaatgactgtagcagaatsccttttctctaaatcagattgtctttcttgcagtttagtttgatagatttgcaagctatgctgcttccatgaagttagctgcgctggtaggaacgcaggcttctttgtctctggttgtagcttgcatgatcgccccattaggcagacaacgtagccggagatcacaaatcaggcccttggtgtagttgctagtgtgtggaggtgcagagaggttggcagaaactgacctcactgggcaagggtggccatggacctgattctttaatgcactctatgtgttcaggaagccacaggccatatttgactctgagaaagaaaacaagaggaaaaaccccacaaagtataacaaccccttaagatacatctattttaaagtgaaattaatttttcagtttataccattggccaattacaagataaaaatgttcaatttctttaagaatcctttgttgacttgtcttttcatctcttgctatttatatttgtcactgttagtcaacaaagtcttatttgctgaggaaggactttgctgcacttactgtaccacatcaaacactggggagggtggtgtttaactttttaaaaaatgttattctgattataacaataatattggcttttttcatgaaaagagcgccaccttgcaaggtttagtgagatttatggaagttgaatacctaagcaggaattgctgctagctccaaaaatttgcgaagcaaaagctagccccaattggtttggaagtttgaaactgattaacagatttgcatttgaagtgactccagacattaggtccagacattagttaaaaatagaaagaggaataaagacatctyttctctctagaaaagataacaccrcaattaataatccttcccactttcattgagatcagcttgtctgataacctgatatgagtgtgataatgataaacatgataatagtggtacttttgtaattttgctggtgcatttaagaagatagtaaakgatgagttcaycttttctycgaacatycctatycctagatgtagtttacctcaaattgggaattataactgtcctaatttttgttgtgtaccctgatgccccttttgctttaatacccacagtgtaacaattaaatatcacactatgacatatgatttaagtaggatattttaaagataaattttaggggtaaatgtttacttcaaaatgactccatatttcaaatatctgtttagactgtgaaggccaaataatttttaagaaaacatttgaagagtagtgtgtttgcatttgtgaataatcttactcacagcaagtaaacgtaataaaagccaacatttaagccaaaaaaaaaaaaaaaa

SEQ ID NO: 53 - DNA, 1558 bp, Homo sapiens
  SITE (17): n equals a,t,g, or c
  SITE (1514): n equals a,t,g, or c
  SITE (1551): n equals a,t,g, or c
  SITE (1556): n equals a,t,g, or c
tgggtatccattcctgnaattactttacttaggataatggcctccagctccgtccaagttgctgcaaaaggtattatttcgttcctttttgtggctgagtagtattccatggtgtatatataccacattttctttatccactcattgcttgatgggcagttaggttggttccacatctttgcaattgtgagttgtgctgctccagatatcatctttaactcctttgccttctccacatacatttccaagtcctgttcattctacctccaaaatgtatcttgtatccattcatctctctccatcttcaatctatttcaatgccccatcatctcttgcatggaggagtgtaataattggctaactggcctgttcttacattttaaaatcaaaagatgtgacaggtgaaatgcctatttcagtgtccattgatggttctgcttacacaccacctggctgcctggtgtcgcagtggcagagttgagcagtgtgaaaaagactgcttggccctttacagggaaagcaggtccactgtggcctgtgaggacgagagctctgggcaggctcggacactggcagaccctggtcctggctggccaaggcagcagggtatgtgtttcgggtcactcacagggctcagcaccactcctcatggcttccttactgtttcggcagaggctgacccgcggctgattgagtccctctcccagatgctgtccatgggcttctctgatgaaggcggctggctcaccaggctcctgcagaccaagaactatgacatcggagcggctctggacaccatccagtattcaaagcatcccccgccgttgtgaccacttttgcccacctcttctgcgtgcccctcttctgtctcatagttgtgttaagcttgcgtagaattgcaggtctctgtacgggccagtttctctgccttcttccaggatcaggggttagggtgcaagaagccatttagggcagcaaaacaagtgacatgaagggagggtccctgtgtgtgtgtgtgctgatgtttcctgggtgccctggctccttgcagcagggctgggcctgcgagacccaaggctcactgcagcgcgctcctgacccctccctgcaggggctacgttagcagcccagcacatagcttgcctaatggctttcactttctcttttgttttaaatgactcataggtccctgacatttagttgattattttctgctacagacctggtacactctgattttagataaagtaagcctaggtgttgtcagcaggcaggctggggaggccagtgttgtgggcttcctgctgggactgagaaggctcacgaagggcatccgcaatgttggtttcactgagagctgcctcctggtctcttcaccactgtagttctctcatttccaaaccatcagctgcttttaaaataagatctctttgtagccatcctgttaaatttgtaaacaatctaattaaatggcatcagcactttaaccaaaaaaaaaaaaaaaaaaaaaaaanaaaaaaaaaagggggccgctctagaggtccaagttangacgngg

SEQ ID NO: 54 - DNA, 948 bp, Homo sapiens
taaaaatcatgctctgtaccatcctcaccgtagtcatcatcatcgccgcgcagaccacgagaactactgggatccctaaaaacgcccctggtccggccccactctgcgcccctcgatctcccaggctctttctgcagwcataccgcggacccaatgggcgccctgcacacccgtttctggggccgtcagacttggatacatcgtaaactccgcctccacggaacgtctcgcctkgcgagcaagmtcggaatccagttcctcaggaacccctccaaaacccacacccccagggacgccgctttccgggatcccggscaaacgccggaccctcagtcgctccaggccccctcaccctcaaagtgtagcgcccccaaccgagcaacctcggtttggtccctaaaaccccgcctcctctataagcaccgccccagctctgacaaaaccccgcctccaggtcggcaggctccgcttcttttcttctccgcggggtgattcagtccagtgattgggtttgtggctccaggcctcgcccacagacggacagacccctccctttcttccggcaaaaggaccgagccctggggtagtaaggsccccacactcctgttttttgcaagtacatttttgtccytcctccacccaggtatctgcctattttcttgctaatcccagaacctttccttttgctttttttaaggacatttgggaagttcctggtgtaggacccttctccctgggataagaaacctgcctgtaaacgctctgtaaatactcccttccacccatcccagcccctgggcagccgggcagaagggaatccaggctatggacctcccaagtccccgctccccgctcccctcggcggccccgccttgttctgatctgtgtgtgagtgtgtgtgaacttctgaaagacaatattaaagagacttagttgaaaaaaaaaaaa

SEQ ID NO: 55 - DNA, 990 bp, Homo sapiens
  SITE (751): n equals a,t,g, or c
  SITE (879): n equals a,t,g, or c
  SITE (888): n equals a,t,g, or c
  SITE (897): n equals a,t,g, or c
  SITE (899): n equals a,t,g, or c
  SITE (901): n equals a,t,g, or c
ggggaactgcagtgacagcaggagtaagagtgggaggcaggacagagctgggacacaggtatggagagggggttcagcgagcctagagagggcagactatcagggtgccggcggtgagaatccagggagaggagcggaaacagaagaggggcagaagaccggggcacttgtgggttgcagagcccctcagccatgttgggagccaagccacactggctaccaggtcccctacacagtcccgggctgcccttggttctggtgcttctggccctgggggccgggtgggcccaggaggggtcagagcccgtcctgctggagggggagtgcctggtggtctgtgagcctggccgagctgctgcaggggggcccgggggagcagccctgggagaggcaccccctgggcgagtggcatttgytgcggtccgaagccaccaccatgagccagcaggggaaaccggcaatggcaccagtggggccatctacttcgaccaggtcctggtgaacgagggcggtggctttgaccgggcctctggctccttcgtagcccctgtccggggtgtctacagcttccggttccatgtggtgaaggtgtacaaccgccaaactgtccaggtgagcctgatgctgaacacgtggcctgtcatctcagcctttgccaatgatcctgacgtgacccgggaggcagccaccagctctgtgctactgcccttggaccctggggaccgagtgtctctgcgcctgcgtcgggggnaatctactgggtggttggaaatactcaagtttctctggcttcctcatcttccctctctgaaggacccaagtctttcaagcacaagaatccagcccctgacaactttcttctgccctctcttgccccanaaacagcanaagcagganananactccctctggctcctatcccacctctttgcatgggaacctgtgccaaacacccaagtttaagaaaaaaataaaactgtggcatctcca

SEQ ID NO: 56 - DNA, 1603 bp, Homo sapiens
  SITE (328): n equals a,t,g, or c
  SITE (336): n equals a,t,g, or c
  SITE (341): n equals a,t,g, or c
  SITE (788): n equals a,t,g, or c
ggtcgacccacgcgtccggcccgccggctccggagcggctctgccttcccgagcgcgggaccgcgccctgggggaggagggcgaacgacgcggcgatggctccgcgggcactcccggggtccgccgtcctagccgctgctgtcttcgtgggaggcgccgtgagttcgccgctggtggctccggacaatgggagcagccgcacattgcactccagaacagagacgaccccgtcgcccagcaacgatactgggaatggacacccagaatatattgcatacgcgcttgtccctgtgttctttatcatgggtctctttggcgtcctcatttngccamctngcttnaagaagaaaggctatcgttgtacaacagaagcagagcaagatatcgaagaagaaaaaggttgaaaagwtagrattgaatgacagtgtgaatgaaaacagtgacactgttgggcaaatcgtccactacatcatgaaaaatgaagcgaatgctgatgtyttaaaggcgatggtagcagataacagcctgtatgatcctgaaagccccgtgacccccagcacaccagggagcccgccagtgagtcctgggctttgtcaccaggggggacgccagggaagcacgtctgtggccatcatctgcatacggtgggcggtgtwgtcgagagggatgtgtgtcatcggtgtaggcacaagcggtggcactttataaagcccactaacaagtccagagagagcagaccacggcgccaaggcgaggtcacggtcctttctgttggcagatttagagtnacaaaagtggagcacaagtcaaaccagaaggaacggagaagcctgatgtctgttagtggggctgaaaccgtcaatggggaggtgccggcaacacctgtgaagagagaacgcagtggcacagagtagcaggtgagccgtggttttggtgacattgggggcagagtggtgcagggtgaggagaaggtacttggagcctcccaggtgctgtggcagcataggaatggtatttgacagggaagtgggagagctttccttgacccaggaagactgagggggactgaacatgattacttgtctgcctagagcttcttgtaaagaagtcacaaacttagtgcctccaggggcttggctgtgtgataatgaggatagaggattacttgtgaggcaatgtggcatggtggggattgtggcaaactagaattcacatcacccaccatatagggcttgcattaccacgaggcagaaagcacctagtgttgctgcatcttcttacgcaaaaaagacaaaatccagacttctaaaatgtaaaatcactgattttcgatattggcagcttactttttttttttaaacaaccatgcaggccaaatgacttgtaatcttgtcaccatttttaggtaaactgtgacttgaaaaagtctggagcaaacaaaccaatgctttttccttttattctgttggraaccagttttctttgtgtcacagttytgaaacctcaatacgaatatttctcttcccaccaaatattttgaggcaattgaaaagccacagtgatttatttcttgatttggcaattttaattttgcaagacaatt

SEQ ID NO: 57 - DNA, 1052 bp, Homo sapiens
  SITE (250): n equals a,t,g, or c
  SITE (1051): n equals a,t,g, or c
  SITE (1052): n equals a,t,g, or c
tacagctcaggatgcctgtaacattgtcatctctgggcttctgggtcctgcttagcctgctttttccctggaggactgaccagggatgcggcccagcaacatgttactaaatcatactctcctccctacctttcccagacctctcactcctgcctggtgttccaacccgttctgtggccagagtatacattttggaacctcttcgaggccatcctgcagttccagatgaaccatagcgtgcttcagcagnaaggcccgagacatgtatgcagaggagcggaagaggcagcagctggagagggaccaggctacagtgacagagcagctgctgcgagaggggctccaagccagtggggacgcccagctccgaaggacacgcttgcacaaactctcggccagacgggaagagcgagtccaaggcttcctgcaggccttggaactcaagcgagctgactggctggcccgtctgggcactgcatcagcctgaatgaggctggccacctgccactttgccctgccctctgcctccagggctccmctmyccttccttttcttggtgaaaggcacctcctttcctgataatgaatggtgttccctttgcttggctggggagccccccaggccaggtttgctggccatagatacctttgggctgcctgrgacaggctcctgaggaggattgagggtgaaagtctcccacgagtacactaaacctaggtctggtcaccaatagggtttggagagcaaagggccacaactcatcagctgcctgtctcttagatgcactttctttttccaccagcacatccttcaacacacagaatttcagggaagagttctccccaaaaccctagctctttacccttccattttagccttccacccagcttccacaaaagatttggctctaccttggatctgctagtaaataactaataggcaggcagttatttgggtaaggaaaaaaggggtgggagagacagaaaatttgcccactgctgctcctccccttggstytccacctgggatttgctattgaatctctaccctnn

SEQ ID NO: 58 - DNA, 814 bp, Homo sapiens
  SITE (3): n equals a,t,g, or c
  SITE (6): n equals a,t,g, or c
  SITE (32): n equals a,t,g, or c
  SITE (751): n equals a,t,g, or c
  SITE (770): n equals a,t,g, or c
  SITE (784): n equals a,t,g, or c
acncgntggcggccgctctagaactaggggancccccgggctgcaggaattcggcacgagcatagacttttaaactggtacggttcttagagatggtccttggccttctgttgttgttgtkgtttttttctttttcttcttctccttctccttcttcttctcttctccttctttcttcttttttttttcagagtcttgctctgtcaccaagactggagtgaagtgatgtgatctcggcttactgcaacctgggaggcagaggttgcagtgagtcgagatggtgccattgctctcgtttgggcaacaagagtgaaactcttgtctcaaaaaaaaaaaaaaaatgaggtttaagacagttttgtcattactggtgggatctggtcacacaagatagcattaaacgtgacatggcacataaaattggttaaaaaattttgttttttaattacgtaatgtaaaagcccaacaaacactttatgcaagattggaatgtatcttcaaattcagatttaataaacatgtaaagatcctctgtatataaaagttgtatttaatcccttgtgccccaagaatgctataaaagatcccaagaatgttatctatgaaaagatagcaatagggaatggtgaacaaataatttaatttgccaattctaaaaaacatggacttaaaccccatgaaaacttggttccatagttttaactgttttatggttccaatacaaaaccagagtggtttacattccacaatnaccaaatttgcatccaatnttggggtaattttnggtatttgccatgggatactattcattttt

SEQ ID NO: 59 - DNA, 1215 bp, Homo sapiens
  SITE (345): n equals a,t,g, or c
  SITE (1024): n equals a,t,g, or c
  SITE (1098): n equals a,t,g, or c
  SITE (1186): n equals a,t,g, or c
agaggaagtcttttgccaagcctgttctctggactaacgccatccaggctgggaggggaagagtgctctgctacactcgtccccctcctgcctcatcttccttctcagccttggttcctgatgggaacagaatggagggcctgagaacatactttctaaatgcctttgacccaggaaccgattatctatatttgttcccattttccttcaccgtgacattccagcattgtctgactgtgaggtgggcctttgagagcctccaggttcctcaaaacaggcctgagcgatgggcatcacaccctctgcctacccacrtgcctgcttacctgccagataaccaagtgnagatgtctgcgagtggctagttttcacattcttactagtgtttggytcacctttgggcaaaggccccctctaggccttgccccacctccatcaaacgcagacactgtagtcagacctcagyaatataggaggcaataatcttttaacagtgttttgcaaacaaacaaaaagagaaaaatcccagccaggggaactcgccacctgcccacgctagttccatccacgctcaagacccgcccttagaccaggcaggcaaaggcccccatcacactcggccactagtggggtcctgaggccaagaaagaaaccagaccctgtatgacaagttgggktctttccagaacacgacagaaacagggggggccccttgttaatgccactccatactccagaagcattattccttatttgggacagccaagggcagattcacaggttattgtaggaataaagactagtttacaaaggaraaagagsccctggacttcccmaggaaaggtcaggttagggctcctgtacccattctgttccaccactgtttgatctctctggcctcccaccaggaatgccgtttcctttttatggatctgttgggaaccagagagaatcaacagatcaatgacataggatccgaagtgcaatgatagtcacttctagtttggcatttcacaaactctgnacagcaaggtattggtaggttactcaatttcaaaagggccccatggccaaatatgtttaggaaccgctgtttgnatttctttttttggagacgcattgtatataatatatgtcaaaggctttcggaattcctgcaggaaagaaatcagctttgttaaatccnaaaaaaaaaaaaaaaaaaaaatagactcg

SEQ ID NO: 60 - DNA, 478 bp, Homo sapiens
  SITE (410): n equals a,t,g, or c
  SITE (476): n equals a,t,g, or c
atttcttatgacatgggggtttgaattggttggcaaatgtttaattttaatatccataatcagtgaggtcctgctggctgtaatcattaattgtgaaatctaaggagcttagttcatggctctagaatttcacagaaaartgygmtatgatacgagcattaagtttatttcttctgatctttgatgcagctttgttcagtttatctgtttttgtatttattggtcatctacttcccatgccaaaagggactggtctacatagctgcgctaaacacctgatcaaatcactaaaagaaaatgtgttacctctaatgaattatcctgattgtaagttaaaaatcaatatttccccgtagtgaggtttgctttttaaaaagaakkcttaaaaaaaaaaaaaaaaaaacgagttnaagaaaaggaagcaagctcaggtaaggtgcacacattgggctaaggaagctagagcctgtggagangc

SEQ ID NO: 61 - DNA, 618 bp, Homo sapiens
  SITE (24): n equals a,t,g, or c
  SITE (39): n equals a,t,g, or c
  SITE (548): n equals a,t,g, or c
  SITE (560): n equals a,t,g, or c
  SITE (562): n equals a,t,g, or c
  SITE (584): n equals a,t,g, or c
tatgaccttgataaccccaagttngaaattaaccttcantaaagggaacaaaagctggagttcgcgcgcttgcagttcgacactagtggatcccaaagaattcggcacgagtcataatgagctactaggtaagccttctgggactttcagatattttggggaagattgatttttgttcttacatgctgtggacccttggccatcaaatggtatggggaagctcatccgtctgtctgtgatggtcatgtcagtcaggcgtctttttagtatttactgggtgctcagtactgtgccagatgctgtcgggagccgtggtggtatggaggaggagtgctccagaggactctgctgtgtggcaggccagcataaacaagccaaggggaaaaggcaggcatggaataaagggggagaataccagtgtgtgacttactgctgactgtgtggattagcctatcagcagtaatcaagcagggcggagggcattatctttgagccagaagagtgagcactggsccgagggtggagcatcaagagggggtgtaggaccncaaggcttcttncnggggagacaacgtcaataagcngtcagtagtcaccgacagttttgggaagcaaggg

SEQ ID NO: 62 - DNA, 751 bp, Homo sapiens
  SITE (158): n equals a,t,g, or c
  SITE (159): n equals a,t,g, or c
  SITE (202): n equals a,t,g, or c
tcgacccacgcgtccgaggagctggacttctgagacagccattctccttgcatagcactgtctgctgctacagctcatagaagtcaacaattttcttcaacactggtaggcagcctctaaatggccctgatcaccctcacctcctgccattcacaccnntgtaaaattccacccctggacctagtgactcacttctaacaangagaatacagcaaaagtaacatcgcttctgaggtgaggctacaaggagactacgatgcctgccttggtcacccttctcctgctctttccattgctccctctgatggaagccagttgccatgtgatgaggtgccctatggagaggcccacgtgacaaggtattgtaaaaagcctctgaccaatagccatctagaaacggaggcccagtccagcagcctctgagatgaatcctgccaacctgagcttggagacagattctctccctatcctgccttgggatgatcacagccaccaccaacaccttcactgcctggtgagaggccaagccagtgaacccaaggtaaactggacagaatcctgacccacagaaactgagataatgtttgttattttaagctgctcagtttgttacagagcaatagataactaactcaaacaccataaaattctaatattttattctatcacacaaaccaggtaataccaagtaaatgccattactatacacatatttttgtaacacaattacatgtgattttttaagaaggct

SEQ ID NO: 63 - DNA, 780 bp, Homo sapiens
  SITE (2): n equals a,t,g, or c
  SITE (4): n equals a,t,g, or c
  SITE (12): n equals a,t,g, or c
  SITE (738): n equals a,t,g, or c
  SITE (776): n equals a,t,g, or c
cngncagtcacngtccccgattcccgggtcgacccacgcgtccgggttggcaactcctgaggcctgcatgggtgacttcacattttcctacctctccttctaatctcttctagagcacctgctatccccaacttctagacctgctccaaactagtgactaggatagaatttgatcccctaactcactgtctgcggtgctcattgctgctaacagcattgcctgtgctctcctctcaggggcagcatgctaacggggcgacgtcctaatccaactgggagaagcctcagtggtggaattccaggcactgtgactgtcaagctggcaagggccaggattgggggaatggagctggggcttagctgggaggtggtctgaagcagacagggaatgggagaggaggatgggaagtagacagtggctggtatggctctgaggctccctggggcctgctcaagctcctcctgctccttgctgttttctgatgatttgggggcttgggagtccctttgtcctcatctgagactgaaatgtggggatccaggatggccttccttcctcttacccttcctccctcagcctgcaacctctatcctggaacctgtcctccctttctccccaactatgcatctgttgtctgctcctctgcaaaggccagccagcttgggagcagcagagaaataaacagcatttctgatgccaaaaaaaaaaaaaaaaaaaccgcggccgaaagcttattnccctttaagtaaggggttaatttttagcttgggcactnggcc

SEQ ID NO: 64 - DNA, 588 bp, Homo sapiens
  SITE (565): n equals a,t,g, or c
  SITE (566): n equals a,t,g, or c
ttccgaattaatcgactcactataggaawtgccgtcgccatgacccgcggtaaccagcgtgagctcgcccgccagaagaatatgaaaaagcagagcgactcggttaagggaaagcgccgagatgacgggctttctgctgccgcccgcaagcagagggactcggagatcatgcagcagaagcagaaaaaggcaaacgagaagaaggaggaacccaagtagctttgtggcttcgtgtccaaccctcttgcccttcgcctgtgtgcctggagccagtcccaccacgctcgcgtttcctcctgtagtgctcacaggtcccagcaccgatggcattccctttgccctgagtctgcagcgggtcccttttgtgcttccttcccctcaggtagcctctctccccctgggccactcccgggggtgagggggttaccccttcccagtgttttttattcctgtggggctcaccccaaagtattaaaagtagctttgtaattccaaaaaaaaaaaaaaaaaaaaaaaaaaaaaaaaaaaaaaaaaaaaaaaaaaaaaaaaaaaaaaaaaaaaaaanncgggggggggcccccccccccc

SEQ ID NO: 65 - DNA, 945 bp, Homo sapiens
  SITE (1): n equals a,t,g, or c
  SITE (13): n equals a,t,g, or c
  SITE (15): n equals a,t,g, or c
naatacgatcatnanagggcgattgggtacgggccccccctcgagttttttttttttttttttggcaagtgagaagatgcagataggcaaaaagraaaaaaaagagatcacacagagattcactgttaacctttggtgtataataaaatcagacactttcctttgcattatgtcacatagaaatgtacaaataaagtgtacatatatacacacatatatgtatacactgttttgcaactcgttattttcactttgcaatatacaatgagcatttttccatgcaaatgaatgagacctcttattaaatgaataagattgggtcaaaagatgagatgttgacaagagtcatatgtaaatctcagcaacatcgaatgactggagtaaaacgatagcaaatatttatcaagaaagtgcagacaaacagaaagcagtggcaacattaataacagaaaataattgaattgtcagagaaattaattaaatgggataaggacggtcccgagaatgcctatggttagaatgcagagccctaaatttctttctyagaccccttatctcttccaaacacctttccatctcatctccctcccttgtcatttcttcatctttaaaatgcctatagtctatgtcctctttaaattcttcgagagactgaagcagcctctgtctaaaattcccttctgtttgctggcgttcaaattctccatacgggcgtttttcctccctctttggcacgctgcactttggctttccttcgttttctttgcagggtttttgcatgatgttgttgttgtttcctgcttaactctgtgcggggtagtttcctgctccttttcttcccccagatgtctgtgaacacagatcctgggacctcttccttcccttggccacaagcacgcacggcacgcttgtctgcagggcagtaaggagctggtacctcgtgcc

SEQ ID NO: 66 - DNA, 1866 bp, Homo sapiens
  SITE (262): n equals a,t,g, or c
  SITE (674): n equals a,t,g, or c
acccacgcgtccggtcctcttcttcagcacatgccaaagctgttcctcacggcctgtgagacaagagcatcttggatgtaggacaatggaagagttagatgccttattggaggaactggaacgctccacccttcaggacagtgatgaatattccaacccagctcctcttcccctggatcagcattccagaaaggagactaaccttgatgagacttcggagatcctttctattcaggataacacaagtcccttgccggcgcantcgtgtatactaccaatatccaggagctcaatgtctacagtgaagcccaagagccaaaggaatcaccaccaccttctaaaacgtcagcagctgctcagttggatgagctcatggctcacctgactgagatgcaggccaaggttgcagtgagagcagatgctggcaagaagcacttaccagacaagcaggatcacaaggcctccctggactcaatgcttgggggtctsgagcaggaattgcaggaccttggcattgccacagtgcccaagggccattgtgcatcctgccagaaaccgattgctgggaaggtgatccatgctctagggcaatcatggcatcctgagcattttgtctgtactcattgcaaagaagagattggctccagtcccttctttgagcggagtggcttggnctactgccccaacgactaccaccaacttttttctccacgctgtgcttactgcgctgctcccatcctggataaagtgctgacagcaatgaaccagacctggcacccagagcacttcttctgctctcactgcggagaggtgtttggtgcagaaggctttcatgagaaggacaagaagccatattgccgaaaggatttcttagccatgttctcacccaagtgtggtggctgcaatcgcccagtgttggaaaactacctttcagccatggacactgtctggcacccagagtgctttgtttgtggggactgcttcaccagtttttctactggctccttctttgaactggatggacgtccattctgtgagctccattaccatcaccgccggggaacgctctgccatgggtgtgggcagcccatcactggccgttgtatcagtgccatggggtacaagttccatcctgagcactttgtgtgtgctttctgcctgacacagttgtcgaagggcattttcagggagcagaatgacaagacctattgtcaaccttgcttcaataagctcttcccactgtaatgccaactgatccatagcctcttcagattccttataaaatttaaaccaagagaggagaggaaagggtaaattttctgttactgaccttctgcttaatagtcttatagaaaaaggaaaggtgatgagcaaataaaggaacttctagactttacatgactaggctgataatcttattttttaggcttctatacagttaattctataaattctctttctccctctcttctccaatcaagcacttggagttagatctaggtccttctatctcgtccctctacagatgtattttccacttgcataattcatgccaacactggttttcttaggtttctccattttcacctctagtgatggccctactcatatcttctctaatttggtcctgatacttgtttcttttcacgttttcccatttccctgtggctcactgtcttacaatcactgctgtggaatcatgataccacttttagctctttgcatcttccttcagtgtatttttgtttttcaagaggaagtagattttaactggacaactttgagtactgacatcattgataaataaactggcttgtggtttcaataaaaaaaaaaaaaaaaaaaaaaaaaaaaaaaaaaaaaaaa

SEQ ID NO: 67 - DNA, 1152 bp, Homo sapiens
  SITE (668): n equals a,t,g, or c
  SITE (745): n equals a,t,g, or c
  SITE (1015): n equals a,t,g, or c
  SITE (1088): n equals a,t,g, or c
  SITE (1110): n equals a,t,g, or c
  SITE (1113): n equals a,t,g, or c
ctcaaggatgtaaaggctctgcagatttcgggaggcctgtctcccagcacctgatgggacactttttgccccactgtaaattctgggtgtatcctccactgtatgctgtcaccccaagggcaagcactgcatctgcttagtgaaggatttattgttcggaagatacattttccccttkagcagagagtggcgtatcctggcagtcttcggtgagccagttgtaccaggattatgaaatgcagatgtttactgtgtcattgttgctgtcattgctactgaggagtactgaccagaatcatctgcaactyttagttggcagagaggaccactatggcgggtagctcttttctttcctgccattgtggggatgattccaggccaaagatgatggaraagtatggaaatcatctgaaaggttgaagcttggcacgtgaagccattcatgactttgtaaggcagttttgctgaaggccagttctgccctgggagggacggaggtgaatcctcctgagtacctgtggttttcttacttcctgctgaatttacctaagtgcctgttgtttgcttgctgtggaggctttctggtatttcatttcaggtgcagatgccttcactttcccaccraaaaaaccccmaccaaacctaagaccttactgcaactaagtytnccaagtactttttaacccaatgggatgaacagcctgtggtctgctcagatcaccctgagtgcgtgtgagaaggcmtnggctttgccaggaaatccaggaaggcagggccgggctgtgttggaagctggcttagctggtggggcagccttatttcaattaaaagggcattgactgggagcagcagtcctggagtttgttgcatttcctattgccctcaaaatgagaaaccaggaaaatagcagattggagccttcgagaaggcagtaaatggctgtttttattgacaaaaggaaaacattttactgccatctcactgatggcatctcactgacttaaaatgaaggcangttgtagtaaaaaaaaaagtctacatttttccaccgccacgttcttatatcctgtttgtcagccactgctcanaagggcatgttgtcttgcggantanaggcgctctccttccctcgttttccctataggttgggtg

SEQ ID NO: 68 - DNA, 2483 bp, Homo sapiens
agcaggcggtgcgctgggggcgggagcagcgcgkagcccggctcggccacaccgatcgcccgccgccatgggctcctcgcaaagcgtcgagatcccgggcgggggcaccgagggctaccacgttctgcgggtacaagaaaattccccaggacacagagctggtttggagcctttctttgattttattgtttctattaatggttcaagattaaataaagacaatgacactcttaaggatctgctgaaascaaacgttgaaaagcctgtaaagatgcttatctatagcagcaaaacattggaactgcgagagacctcagtcacaccaagtaacctgtggggcggccagggcttattgggagtgagcattcgtttctgcagctttgatggggcaaatgaaaatgtttggcatgtgctggaggtggaatcaaattctcctgcagcactggcaggtcttagaccacacagtgattatataattggagcagatacagtcatgaatgagtctgaagatctattcagccttatcgaaacacatgaagcaaaaccattgaaactgtatgtgtacaacacagacactgataactgtcgagaagtgattattacaccaaattctgcatggggtggagaaggcagcctaggatgtggcattggatatggttatttgcatcgaatacctacacgcccatttgaggaaggaaagaaaatttctcttccaggacaaatggctggtacacctattacacctcttaaagatgggtttacagaggtccagctgtcctcagttaatcccccgtctttgtcaccaccaggaactacaggaattgaacagagtctgactggactttctattagctcaactccaccagctgtcagtagtgttctcagtacaggtgtaccaacagtaccgttattgccaccacaagtaaaccagtccctcacttctgtgccaccaatgaatccagctactacattaccaggtctgatgcctttaccagcaggactgcccaacctccccaacctcaacctcaacctcccagcaccacacatcatgccaggggttggcttaccagaacttgtaaacccaggtctgccacctcttccttccatgcctccccgaaacttacctggcattgcacctctccccctgccatccgagttcctcccgtcattccccttggttccagagagctcttctgcagcaagctcaggagagctgctgtcttccctcccgcccaccagcaacgcaccctctgaccctgccacaactactgcaaaggcagacgctgcctcctcactcactgtggatgtgacgccccccactgccaaggcccccaccaccgttgaggacagagtcggcgactccaccccagtcagcgagaagcctgtttctgcggctgtggatgccaatgcttctgagtcaccttaactttgaaccattctttggaattggcgtggtatatttaaccacgggagcgtgtctggaaacgcaaactatcattaatttcatactagtttgtaccgtatctgtaggcatcctgtaaataattccaaggggaaaactaaacgaggacgtgggttgtatcctgccaggttgagtggggctcacacgctagggtgagatgtcagaaagcgcttgtattttaaacaaccaaaaagaattgtaagggtggcttgctgccaggcttgcactgccgttcctgggggtgtgcatcttcgggaaaggtggtggcggggcgtccactaggtttcctgtcccctgctgctccttccgtaagaaaatgaaatattctatgcctaatactcacacgcaacatttcttgtactttgtaagtcgtttgcgagaatgcagaccacctcactaaactgtaaacggtaaagagatttttacttttggtctccgtgagtcgcatctctactaaggtttacacaggaattccacctgaagacttgtgttaaagttctacagcgcgcactgttaactgaacgtctttttcttcagcctatacgcggatccttgttttgagctctcagaatcactcagacaacattttgtaactgctgctgttgctttctacatacaccttataaagtgacatttcaaaagaaataaggtgccacagttttaaaccagaaggtggcactctgtggctccttgtagtattatagctatactgggaaagcatagatacagcaataaagtacagtaattttactttttttcttgtgttacatctaaattacaacccttaattgccacgtgtgcacttactactctccagtatgtcttattactctccagtatgtcacgcatctttaacttttcacgtcctatgtttgctttctcccatttttaagagatggtaagttaactggaattgatttactgaatgaaattaaatgcagatatccctgtttttgaaataaaaaaaaaaaaaaaaaaaaaaaaaaaaaaaaaaaaaaaaaaaaaaaaaaaaaaaaaaaaa

SEQ ID NO: 69 - DNA, 536 bp, Homo sapiens
gagaaatggagctttgttagataaaaattttttcaacgcaaacagtcattttccagtgaaaggagagcgtatccgccgtaggatggacttagatcgtgtaaaagctgaggccaccgaggatataacctccggggtcctttgcctccttttccttagactccctccaaactcgtgtatctttccttcagcagtactgggctccacgcgaacctagtcctttgtctttaccctattacctttcataacatcctagttgaaaagtarttattcaaccgcgtttgaaaatgagaacaggttcacagargctaggttacttgcgaaggtcgttcaattagtaaccagtaacgccaggactgccagtttcttgcttccgaattctcatggtagctttcaccargctccccgtcmaatgctaacgtcaactactgaactagattagcaaaaaggtcttttaacagaattcctggttttcagagagagtttctttcatgaagcgccccatttctacagaggaaaataaactccaagcagccagt

SEQ ID NO: 70 - DNA, 574 bp, Homo sapiens
ggggggcgaattcccctggcacgaggctgacgcatgcgcatagctaaccgcacccggttcagctcgcctttcttggccagaggcgccggttggactcacgggcggggcatgatggtggtgggtacgggcacctcgctggcgctctcctccctcctgtccctgctgctctttgctgggatgcagatgtacagccgtcagctggcctccaccgagtggctcaccatccagggcggcctgcttggttcgggtctcttcgtgttctcgctcactgccttcaataatctggagaatcttgtctttggcaaaggattccaagcaaagatcttccctgagattctcctgtgcctcctgttggctctctttgcatctggcctcatccaccgagtctgtgtcaccacctgcttcatcttctccatggttggtctgtactacatcaacaagatctcctccaccctgtaccaggcagcagctccagtcctcacaccagccaaggtcacaggcaagagcaagaagagaaactgaccctgaatgttcaataaagttgattctttgtaaaaaaaaaaaaaaaaaaaaa

SEQ ID NO: 71 - DNA, 932 bp, Homo sapiens
  SITE (884): n equals a,t,g, or c
tcatcatatacaaagtttttcgtcacactgcagggttgaaaccagaagttagttgctttgagaacataaggtcttgtgcaagaggagccctcgctcttctgttccttctcggcaccacctggatctttggggttctccatgttgtgcacgcatcagtggttacagcttacctcttcacagtcagcaatgctttccaggggatgttcatttttttattcctgtgtgttttatctagaaagattcaagaagaatattacagattgttcaaaaatgtcccctgttgttttggatgtttaaggtaaacatagagaatggtggataattacaactgcacaaaaataaaaattccaagctgtggatgaccaatgtataaaaatgactcatcaaattatccaattattaactactagacaaaaagtattttaaatcagtttttctgtttatgctataggaactgtagataataaggtaaaattatgtatcatatagatatactatgtttttctatgtgaaatagttctgtcaaaaatagtattgcagatatttggaaagtaattggtttctcaggagtgatatcactgcacccaaggaaagattttctttctaacacgagaagtatatgaatgtcctgaaggaaaccactggcttgatatttctgtgactcgtgttgcctttgaaactagtcccctaccacctcggtaatgagctccattacagaaagtggaacataagagaatgaaggggcagaatatcaaacagtgaaaagggaatgataagatgtattttgaatgaactgttttttctgtagactagctgagaaattgttgacataaaataaagaattgaagaaacacattttaccatttaaaaaaaaaaaaaaactngaggggggcccggtacccaaatcgccgcatagtgatcgtaaacaatct

SEQ ID NO: 72 - DNA, 996 bp, Homo sapiens
  SITE (584): n equals a,t,g, or c
cgcctggcaccatgaggacgcctgggcctctgcctgtgctgctgctgctcctggcgggagcccccgccgcgcggcccactcccccgacctgctactcccgcatgcgggccctgagccaggagatcacccgcgacttcaacctcctgcaggtctcggagccctcggagccatgtgtgagatacctgcccaggctgtacctggacatacacaattactgtgtgctggacaagctgcgggactttgtggcctcgcccccgtgttggaaagtggcccaggtagattccttgaaggacaaagcacggaagctgtacaccatcatgaactcgttctgcaggagagatttggtattcctgttggatgactgcaatgccttggaatacccaatcccagtgactacggtcctgccagatcgtcagcgctaagggaactgagaccagagaaagaacccaagagaactaaagttatgtcagctacccagacttaatgggccagagccatgaccctcacaggtcttgtgttagttgtatctgaaactgttatgtatctctctaccttctggaaaacagggctggtattcctacccnggaacctcctttgagcatagagttagcaaccatgcttctcattcccttgactcatgtcttgccaggatggttagatacacagcatgttgatttggtcacctaaaaagaagaaaaggactaacaagcttcacttttatgaacaactattttgagaacatgcacaatagtatgtttttattactggtttaatggagtaatggtacttttattctttcttgatagaaacctgcttacatttaaccaagcttctattatgcctttttctaacacagactttcttcactgtctttcatttaaaaagaaattaatgctcttaagatatatattttaygtagtgctgacaggacccactctttcattgaaaggtgatgaaaatcaaataaagaatctcttcacatgaraaaaaaaaaaa

SEQ ID NO: 73 - DNA, 785 bp, Homo sapiens
ggcacgaggggctttgcgtacacaatagctgctaggagtacccaaagcctgartacarcctgctggtgtcatggccacgtgtgagcaggccagcgtcamacggctcgctgtgacccgtcccgragactgaaatgggcctgggtcttctcctkgtcctgtgatwaaagtcctctcttgaaagtggagagcaaaggcacacagaggtgcgcgctcacaagaattcctcccggtgactgggtaatcaatgttactgctgtttcctttgcaggaaagaccacagcaagattctttcattcgtctcctcctagcctgggggaccaggctcgaactgaccctggacatcaaaggagggattatgtggctgctaaagccatcggcccacagccctgttcacrtcttggtgcttctctttcccagaggctggtcccagccaggcacacacaaaaggcagattctcgtaaacscagcctccctccctggaggctgcctcctgccctggatctggagtggagctgctctgagattttgagttcttctgcagagatgattaaatatatccaagagacattggaaaacctgctgaacattttacattggtctgctcagcacatggctggatgcggatatttctataattccagaaagtcacacagctcctctgtatgagaccagtgggcgccatttaaaagaacaggatgagaatctaagatatattattaataaatgtaatggattttttttttgtaaaaaaaaaaaaaaaaaaaaaaaaaaaaaaaaaaaaaaaa

SEQ ID NO: 74 - DNA, 1069 bp, Homo sapiens
  SITE (20): n equals a,t,g, or c
  SITE (92): n equals a,t,g, or c
  SITE (886): n equals a,t,g, or c
tcctcaccattcccctaggncaggtccctgcaggtcccacacttctcccaggtccctaaacttgggtcggtcctttccctggagtagctggntcctccagtcgaggtccctgttcagtcggttcttaggctcctgcacatgaaggtgtgtgcctgtggtgtgtgggctgctctaggagcagatacaggctggtatagaggatgcagaaaggtagggcagtatgtttaagtccagacttggcacatggctagggatactgctcactagctgtggaggtcctcaggagtggagagaatgagtaggagggcagaagcttccatttttgtccttcctaagaccctgttatttgtgttatttcctgcctttccgagtcctgcagtgggctgccctgtaccctgaacctcatgagcctctaagggaaaggaggaacaattaggacgtggcaatgagacctggcagggcagartacaagcccagcaccagtgtcccagccttactgggtccttaccctgggccaaacagggagggctgatacctccttgctcttcctagatgcccacctcctacaatctcagcccacaagtcctctccaccctagggggcttgctgcatggcaataactcataatctgatttggaggtttgccctttacaggggcagattttctgctcagttcaacaatgaaatgaagaggaactccctctttctacagctcacttctatcagaggcccaggtgcctcagagccacattgagttgctttttctgggatgaggaagtagggttaaactccccagtttcctgagggaggctcctgacaggtgccctttgtcagaccctaccacagcctggataggcagccacattggtcctcgcccttgctcggnactccgtggtggtcctgcccttctccctgcatgcctgtgggtctgctctggtgtgtgaaggtcggtgggttaactgtgtgcctactgaacctggcaaataaacatcaccctgcaaagccaaaaaaaaaaaaaaaaaaaaaaaaaaaaaaaaaaaaaaaaaaaaaaaaaaaaaaaaaaaaaaaa

SEQ ID NO: 75 - DNA, 831 bp, Homo sapiens
ggacattagatcactgtggacctaaaacaaacaaacaactataaggaaaatggcattagaaatggtctggggatcagtttatcactgcagttgttacatcaccccatggtctaaaatacagagctttagtctgtctctgtttcagttcattttacaggaggtgaacatcacacttccagaaaactctgtctggtatgaaaggtataaatttgatattcctgtctttcacttgaatggccagtttctgatgatgcatcgagtaaacacctcaaaacttgaaaaacagctcctgaaacttgagcagcaaagtactggargctgactgatgccctcatgattttccaccctctcttcccataaagcatcttcctaaggaaatgamcatggcctgatactcattttgtcacttgtacagagccctaaggatgttctgaattcagtggtgccaaataaatgttgacattccccttttggttgatggaagtatcagtgtgggaactgtttgcttaatggcattttataaaataakaakakcatattagcagggagggagatgatggagggagggagaagtccatttgtcttatttatcctttttgtattaatagagaagcacttcacagtcactggcaatgccatttataggaagaaggttctgcattcctgctgctcccggagggcttaactttttaatgaaagaataaatgctcttccactcagtagataaagtgaaatgtgaattgttaataactgtgcacggtcaataaagcgatgttttaaggaatacaaaaaaaaaaaaaaaaaaaaaaaaaaaaaaaaaaaaaaactcga

SEQ ID NO: 76 - DNA, 590 bp, Homo sapiens
  SITE (12): n equals a,t,g, or c
  SITE (27): n equals a,t,g, or c
  SITE (30): n equals a,t,g, or c
  SITE (35): n equals a,t,g, or c
  SITE (76): n equals a,t,g, or c
tatatatagacngttaatagtcgtgantgntgtgnacgaacattaacggaagtagcatgtagccagtcgaataacntataaggacaaagtggagtccacgcgtgcggccgtctagactagtggatcccccggctgcaggattcggcacgagctgccaggtgaggagcagagagactgttcccttgggtggagaggtgtgggcatgagagccacccattgccaagcagcaagaatgttcgtgcttttttcccttccaaaatatgcagggctcaggctcccaattccgggcctgtctgctttgcttgtgtttctcctgtccctgttctcccggagggcccaggtggaactcacgacagggagggagacgcttcccaaaaacctgcagggctatttcccagaatttggttttcaagtacaaaactttttgtcctgtaagatatatgcagcctcacagaagcagcctctgcctccactttaccagctacgtttttatcttaagcacatggggctcccttagaacttactccactgatttaaaaaaaaaaaaaaaaaactcgagggggggcccggtacccattcgccctaaaagt

SEQ ID NO: 77 - DNA, 1274 bp, Homo sapiens
gagccaccacacctggcctggaaggaacctcttaaaatcagtttacgtcttgtattttgttctgtgatggaggacactggagagagttgctattccagtcaatcatgtcgagtcactggactctgaaaatcctattggttcctttattttatttgagtttagagttcccttctgggtttgtattatgtctggcaaatgacctgggttatcacttttcctccagggttagatcatagatcttggaaactccttagagagcattttgctcctaccaaggatcagatactggagccccacataatagatttcatttcactctagcctacatagagctttctgttgctgtctcttgccatgcacttgtgcggtgattacacacttgacagtaccaggagacaaatgacttacagatcccccgacatgcctcttccccttggcaagctcagttgccctgatagtagcatgtttctgtttctgatgtaccttttttctcttcttctttgcatcagccaattcccagaatttccccaggcaatttgtagaggacctttttggggtcctatatgagccatgtcctcaaagcttttaaacctccttgctctcctacaatattcagtacatgaccactgtcatcctagaaggcttctgaaaagaggggcaagagccactctgcgccacaaaggttggggtccatcttctctccgaggttgtgaaagttttcaaattgtactaataggstggggccctgacttggctgtgggctttgggaggggtaagctgctttctagatctctcccagtgaggcatggaggtgtttctgaattttgtctacctcacagggatgttgtgaggcttgaaaaggtcaaaaaatgatggccccttgagctctttgtaagaaaggtagatgaaatatcggatgtaatctgaaaaaaagataaaatgtgacttcccctgctctgtgcagcagtcgggctggatgctctgtggcctttcttgggtcctcatgccaccccacagctcccaggaaccttgaagccaatctgggggactttcagatgtttgacaaagaggtaccaggcaaacttcctgctacacatgccctgaatgaattgctaaatttcaaaggaaatggaccctgcttttaaggatgtacaaaagtatgtctgcatcgatgtctgtactgtaaatttctaatttatcactgtacaaagaaaaccccttgctatttaattttgtattaaaggaaaataaagttttgtttgttaaaaaaaaaa

SEQ ID NO: 78 - DNA, 1133 bp, Homo sapiens
aggatttttccttgttcaaccaaaatctgagcattctttctatgttgaaaacactgaaaaactaatttwagttaatgaactagaaagaatattgattttwaagaaacagaaaaatactacttattttccttctcaaataacgtttctttcaaaaacttctggctgaagtataacatgctggtagttaacataaatcttgtctttctcttgttctttatctttctttgttatttagatgcttgtataaatgtcttttgtttttattaagtgcctaattgacagagcttaatttgaagaagtgccctaatttattgaccacttaagaattgcctttattggggtattttatttgttcctgcgtctttttgatgttgttcagtctactcatccctgtgagtatgtgtgggggacagctgatagaagggaggagagtgtgtctatgctcaggattgccctttagccactcagccagagatccacagggagcaacaaggacagtttcacatgcttagactttcttggaagaaacagtgaggaggagtaagtcgtgagtagtgtcaagctggatgtagaattgtcctaaggcagttgaccccaccttccaacatgttttcactttatttgcccctccctacatttgggttaggttccatttggatttgcagcaataatgactttatttctctcttggtcaggatttggcacataaaatccttttattatagaactagctattttagttacatagtaatgtaactaatggagagatttatagagaattttgkttttgctgtcatatatgtccattttggagacagatatgatagaactagaaattaagttgcatttctgcaagtgccatttgaatgaacttcaagtatcttcttaattattaaattttctgatgaaggcattgtaacaaatatatagtattattaaatctaattaatatttggaaatattaataaataggtattttatttactgtaaaaagtcaaacttcattatgtagataaatcttattcttttcattctttcccctgtttacatcctttttacaaagcttagtcaccaattaaagctttcctatcaaaaaaaaaaaaaaaaaaaactcgagactagttctctctcct

SEQ ID NO: 79 - DNA, 661 bp, Homo sapiens
gaattcggcacgaggggaaaaggatgctgaacgagagcagaaagcctctttcctttgcttcacgcctttccagtctttattttaaactcgggttccctttctgtggtcgcagcaacctttactccacctgcactgctgctcctgggggctccccaggcctccctctgcctttctacccagtggctgacgggatgcctgtcttgcctggacgcaccactgctctcctgtccctcaccttggcttttgctgtgccctgctctggggttgaagctggcccatgtgtcccccggagtcatggctgctcctcctgggaggcctctgtgtgcgtcacgtcttccacacctgggggcagctggcgagcccgtgctctgttcccctcggctgcttggcacagagytgcagcctgggaytctccgtggacccagactggggattttgccaggggggcgatgggaggagcaggtgctttgcctggcggctgtgtctgcatttctggacgccccagagcacagaagttgccggcactttgaggtcttcctcggcatgtgccagattacatgagtgacggctgggaatatgttttcttttttgtaatggaggcgtgtttcacatatagtaaagctcaccaaaaagtaaaaaaaaaaaaaaaaaaaaaactcga

SEQ ID NO: 80 - DNA, 1378 bp, Homo sapiens
agacgtgaaacatgtgaacactcaagtgaagcaaaagccttccatgattacccttttatgtcacctcggtaccctggaggtccaaggcccccattgaggatacctaatcaggcacttggaggtgtcccaggaagtcagccattactccccagtggaatggatccaactcgacaacaaggacatccaaatatgggtgggccaatgcagagaatgactcctccaagaggaatggtgcccttaggaccacagaactatggaggtgcaatgagacccccactgaatgctttaggtggccctggaatgcctggaatgaacatgggtccaggtggtggtagaccttggccaaacccaacaaatgccaattcaataccatactcctcagcatctcctgggaattatgtaggtcctccaggaggtggagggccaccaggaacacccatcatgcctagtccagcagattcaaccaactctggtgataacatgtatactttaatgaatgcagtacctcctggacctaacagacctaattttccaatgggycctgggtcagatggtcccatgggtggattaggaggaatggagtcacatcacatgaatggctctttaggctcaggagatatggacagtatttccaagaattctcccaataatatgagcctgagtaatcaaccgggcactccaagggatgatggcgaaatggggggaaatttcttaaatccttttcagagtgagagttactcccctagcatgacaatgagcgtgtgatccattaccaagtctcctcatgaaaaccacagtgagtcagcccttcacagaactactacggaagaaaattattcatcacagtgtacagttaaacaaaggaatctcagtcacaccaaaccaacctttttatttcctgctctctcccctcttttgtgaagaaagcgggtccaaatgtgattcaaacaactgtacggagtggcatattagaattgccctaaactgaactgcaaataattatgtgtgtatgtatatgtgtgggaaagagaatgtactgtatatgtgtatgttatacagacatatacacatacatacattgacccacaggacattgtaaaatattatcacatgacatcttaagtagaaataagtagggacttttattccatcctttttttcacgtttacattttaattattacaagttgctcctgccccctccctgaactattttgtgctgtgtatatcactgctttatataagttattttttaaggtgaactcagatgttatggttttgtaaatgtctgcaatcatggataggaataaaatcgcttatttgagagctttcattaaaaaaaaaaaaaaaaaacttcgagggggggcccggtacccaat

SEQ ID NO: 81 - DNA, 1440 bp, Homo sapiens
  SITE (38): n equals a,t,g, or c
  SITE (41): n equals a,t,g, or c
  SITE (1128): n equals a,t,g, or c
  SITE (1129): n equals a,t,g, or c
  SITE (1440): n equals a,t,g, or c
actttgtccaaatgtgtctgtcacatgtagtcagctgnagnaatttaaaatgaattgccaagtgaagagtctgtggattaattggccgttaattaacaggctttatcaatgtgtcctcaagggagaggcccaaccctaattaaggagctaaacttcctgagtgaggggctgtgaggatggaggtggaggaggcatctggggcgggtggtggccgggccagcagatggcgcctccctggctgagctgcccgcaccgccagttccctcatttccactcaggaaggcagagaaggcagagtgatctcctcaaggaagagcttccccagccttcgggagcagctggcagggcgtccgggaataagccctacacgccgccgcctgcctccaactcactaaccctgcgcctcttgtctttcagattcaacgcgttcaacagaagccatccccagcccagcttaaattataaagatagacaataactctgttccaatctgcgtggtgcttctttagtaaatactgtacagattttaccatggagaactttttttttagtttttaccttttcttaattacccttattccgaatggacgaacactttctaccactgctgaccattgtaaaataccgtgtatataaatcccattgaaataatgccctggaatagaacatctcaaatgctgcttaattacagactcaggtcgattacttgtatttcatgtaatgttcctccaagttagacatctggtgcaagaccaaccgggagaccatggaattgtcaaaagtacaaactgacagtgtgtatatttaatttaaagacttatttaaaaactcacaagctctcacctagactttggagagcagtctgttttctgtaatgtctgatactagaaactaatttgcttattttagttgtattcaagatttgaagatgtattttatagacaagttctgtttttgaactttgtggaactgttccaatcaatcaatttcccagttatgatgagtatttacattatgaatgtataacccagacatgatttgtaaagccgacagtatgtttctattacacaacactttttgatacagcgtctcttgtcttcactgatactggagtctccgttgtctgcnnggtcccttcgagtttctagttacagacacaatcatactgtgattttatttttaatatggatatgctatcaaactgtgatacacttataattcactggtcctgcatcaggagatggagtggggaaaactgtatttaatacagtttgtatctgaataatctgtatggtttatacagtttgtgttgttcagagatgtttaaagtttgatctttgtttttctaaagattaaaaaagcacttgccccactgtaaatatacagcatgtaaaatttctrtagtatataaatggcagcaaatcacaaaaaaaaaaaaan

SEQ ID NO: 82 - DNA, 1381 bp, Homo sapiens
  SITE (1379): n equals a,t,g, or c
cccgggctgcaggaattcgkyacgaggccagcagttgctcccagttcaggaggtgctcctgtaccctggccacagcccaatcctgccactgctgacatctggggagactttaccaaatctacaggatcaacttccagccagacccagccaggcacaggctgggtccagttctgacctgagcacggtttttcctcatgtgacttctgggaaggcgctccctcatctgggccaaaggaaggaggacgaagccctcctcagctggcctgtgtttggggcatgaatctctcctctcctccttgtctggctctgttgacaaaccgggcatgtttggcagtaaattggcaccgtgtcacactgtttcctgggattcaagtatgcaaccagaacacaggagaagaaaagctccaggatccctgtccccatctgtcctcttgatgtgagagagactctgagacttcttccatcgcaatgacctgtattaaacacaagccccccaagcaaaagaagaggttgagtttgctgccaggattcagatcagcccttcccagggtctgcaggtgtcacatgatcacagttcagcgggaggctttccgtacccacactggctgtagcacttcagtccatctgccctccagaggagggtttcttcctgatttttagcaggtttagaggctgcagcttgagctacaatcaggagggaaattggaaggattagcagcttttaaaaatgtttaaatattttgctttgctaatgtgctgatccgcactaactcatctttgcaaaaggaactgctccctcggcgtgccccagctggggcctctgaagggattcctcactgtgggcagctgccctgagcttcaggcagcagtgttcatctctggccagttgtctggtttccatgtattctaggccaggtaggcaacacagagccaaggcgggtgctggaagccagacggaacagtgttggggcaggaaggtggatgctgttgtcatggagctgtgggagttggcactctgtctgctggtggccctctcggctcacatgttcacagtgcagctcctggcagacttgggttttctctttggtggtttctaaagtgccttatctgcaaacaacttcttttctccttcaggaactgtgaatggctagaagaaggagctcagtaaactagaagtccagggttgcttggtttactggtttataagaaatctgaaagcacctctgacattccttttattaactcacctctcagttgaaagatttcttctttgaaaggtcaagaccgtgaactgaaaaaagtgttggcctttttgcgggaccagatttttaagataaaataaatatttttacttctgtcaaaaaaaaaaaaaaaaaatntc

SEQ ID NO: 83 - DNA, 1706 bp, Homo sapiens
actgcaccactgcccaggtctcccggctggatgaagacgtggtccatgaggaagctggctagctcagactggagagtagcttcaggaaaaaagacaagtggcctaaggaaatcacggcccccaactatcatctgagggctaaagatgagaagtagatcacttaataagacaaaagcctgtagggggaaaagaaaggatgtttaaaaggacagaatgtttcccaaggtagaaatgacactgtcaatttctccttggaatgggggcagggatactcgccttgttgctcccacttgagtcagtactcacctgctcctggatctcagtatccacatctgagaggcaactctggcagagttcacagaaggccaccattctgtccctcaaactcgacagctgcttctgtgggcacagtggcttgaaggggaagaatgaagacacagactcctctgttcccattatcccatctaagacccacactcacctggggaagcatctgatttagaaatgtgggttagtgtccagagaatggaaaaatagacaagagtcaaggctggcaggataacctgtaacaacaaagggtttgaaaaatgaggtttgggttaggagagggagagacagatagccagaaacacaccagtgaagaggagagaaaatgagtaaagggagagctaattccttttccagtggaaaatgagtgatattctggacattcttcagaggcatctacacgaagtagaaatgtcaccgctccctaatttactctacgtcttctagaatccctcaatattatccttggcttccaggaaatccaagaagaccctggaagtagagtccaccttctaagagaggaatgtaagaggtgacccccacccacctgatcttcctcgctttgtccactccacgcactgagacttgacacacctagtggccacctagaacgtaggtccttaaaatytagccccccagcccccaacccatctctagcctgtccactcacctggtgaggaacytytcctgtgtccacagcyttctgcaggagttggcaacatggctcatagagctcccagcgagtcaggtcatgagtgctttgggggagaaaggggaatgttatactggaaaagaacagagggaaccaactccacagacaccagtaaaaacgggatggggaagaggaggaaagccactcacttgtagaaggcagagaggcgtttcagagtggctgccagattatatacctcatcctcatctaggaaggacgactgagaaggaaagaagatccacaatagcatttcccccagaactcatcagtccacatcccccgtcttgcagcccctcccacccttgtttggggtgtcccattgtccagccccagctcctacctgtaacagctcttcaagctcctgctggaarcggtcagtcagcaaatctactagctggctgcgggcaaagtccgcccggctgaagaaagtgaattcgggattacagagcaggtaagagcatgcgccccagcctcaagcaccgctggctctgcatgcttcaccaccacctcctggagttgctgcaggaacagctccaggtgctgagaagaaaaggcagaagatggtgtgctgtggggatgggaggaggacactcttctggcgggaagtggaacggggttaaaagcattaaacttcaaggataagatgcctaaraaaaaaaaaaaaaaa

SEQ ID NO: 84 - DNA, 573 bp, Homo sapiens
gaattcggcacgagcttggtagccttagaactgcatgagctgctttaccactgggaaacacgagcacagcctagcttgattttgtatgtggtatcagatctaaggtggatggaattcaggacttcctgtctactctttgattttgttttatttttagaaatgttttattttgttttattcatttattcatcttcagagacatggtctggctctgttgcccaggatggagtgcatggtgtgatcataggccactgcagtgttgagctcccgggctcaggcgatcctcctgcctcagctyccttagtagctgggactataggcacatgccctaccatgcctggctttgtctactttttgaatgatgtcycaaactagaaggtctattaatttaaaaaattaaggatagcatgccataattaaaaataataacagtgggaaaaggcaccttccaatgattcagacatcaacttgtgatttaaaaaaacgaaaaataaataataggaaaaaaaggggaaaaagttaaataaaaataaaattaaaaaaaaaaaaaaaaaactcgaggggggcccggta

SEQ ID NO: 85 - DNA, 684 bp, Homo sapiens
ctctttggctgtgtctacctccttcatctgctgcgccgacataagcaccgccctgcccctaggctccagccgtcccgcaccagcccccaggcaccgagagcacgagcatgggcaccaagccaggcctcccaggctgctctycacgtcccttatgccactatcaacaccagctgcygcccagctactttggacacagctcacccccatggggggccgtcctggtgggcgtcactccccacccacgctgcacaccggccccagggccctgccgcctgggcctccacacccatccctgcacgtggcagctttgtctctgttgagaatggactctacgctcaggcaggggagargcctcctcacactggtcccggcctcactcttttccctgaccctcgggggcccagggccatggaaggacccttaggagttcgatgagagagaccatgaggccactgggctttccccctcccaggcctcctgggtgtcatccccttactttaattcttgggcctccaataagtgtcccataggtgtctggccaggcccacctgctgcggatgtggtctgtgtgcgtgtgtgggcacaggtgtgagtgtgtgagtgacagttaccccatttcagtcatttcctgctgcaactaagtcagcaacacagtttctctgaaaaaaaaaaaaaaaaaaaaac

SEQ ID NO: 86 - DNA, 1036 bp, Homo sapiens
  SITE (1020): n equals a,t,g, or c
  SITE (1024): n equals a,t,g, or c
  SITE (1032): n equals a,t,g, or c
tggaggcagatgcacaggagaaaggttcccgtccgcaccctctcagacctgaggctgagcttgcagtgagggcttctcctcggcccctcgcccgcccccagagctgccatccctgctgttacaagccagaggagcccggatgtgaggccccagatcacctccagggacttggggttcccatctgaaatcctttatttttgtaccatggggtgggccccgggctgagaaggaagaagcaccctctccccggcctcctctgtctgcacccgtggggctgtgacttactcctgcctccaggggcggggcggggccccctgggacctcttaaggcccaaggtgggccccaggacctytgggcagagtggaytgctcatggcagatgtgtggcaatgtctggctgwgtctttccggcamctgcgtyccctytcccgggytcccctgctgcatggtggatgtgctccttcctggcccggtcacattgcctccttgagccttagtccagggggtcactyctcccaccccacctacctcacagggttgttgtgagggtgcacagaggagcaaagtccctgaaggccctcaggcagtatataggggccgcccaccttcagctgccctgggatgggaaggacccagcccgacccctgggcataacactgtgtttgcaaatggagattcaggtattggggatgcaggttgtggggagctggcctggcagagtaggggtagttggcttggccttctctttggtgatcccacccccagccatttgcattgctggcccagcgcctggcctggggggcggggagaggcagcagaaggggctgggcaggggcggtggaggactcaggaactgcccggggagagtgggtatggcggctgagccaggggccctcctgtgtttgacttcccgggatgggtccttgcttctcagctgtgtccgaccccaccatgtaataaaacccaaaggaacagcaaaaaaaaaaaaaaaaaaaaaaaaaaaaaaaaaaaaaaaaaaancccngggggggncccg

SEQ ID NO: 87 - DNA, 908 bp, Homo sapiens
  SITE (805): n equals a,t,g, or c
ttaaacaaatggaatcatgcaatatgtgaccttttgcgtctggcttattttatttagcataatgtttttgaggttcatccaagctgtagcatgtatcagcacctcatttctttttctggctgaatattattccattatatggatttaccacaattcatttacctattcatcttttgtttctgctgtctggctattgtgaataatgcttcgataaacattcatatacaagtttctatgtggctttatgttttcatttctcttggctatctacatgggagtagaattctaggtcataatataattttatgtttaacttctcaaagaattgccaaaaggtttttcatagtggctgcatcatttacattcccaccggcaatgtacaaggatttctatttttccatatccttgcacttaccaacacttctttttkgtwatwattttgttttttcattattgccaccctagtggatgtgaaatggcatcttattgttttgatttgcatttctctaatgacaaatgatatcatactttttttatgtgcttacggatcaaaggtatttccttggagaaatgtcccttcaagtcctttgccatttcaaaatttggttatttgtcttttattattcagttttaagaaattctggccaggcgcagtggctcacctgtaatcmtagcactttgggaggccaaggcgggcagatcacttgagktcaggacttcgagaccagcctggccaacatggtgaaaccccatcttactaaaaatacaaaaattagctgggcgtggtggcaggtgcatgtaatcntatctactcaggaggctgaggcaggagaatcgcttgaacccaggaggcggaggctgcagtgagccaagatcacgccattgcactctagcctgggtgacacaga

SEQ ID NO: 88 - DNA, 655 bp, Homo sapiens
tgcactggttccttctccccagcaaatactgccttcttgtttttctctgatgtggcaggtgactacaaaatccgccttggtattcttcaaatgcatatatattcctttcttgtcagctccctctcttcctagattagaaaactgcctcattttctgctcactggatgtgcagtcccagcttgtcttcctctcctccccccctgttgcaggtgttctttttttttttcttctctccccactgggcagcaaaagttgttccacagtggaaawttaggcatcctcaagtttcytcccagcttctgctgtgttttcttagagtaaattgccaatttctgtttttacaggaaatccttttttaaaaatggaatcagtgtggtccccatctactctgcaaaaattgcatttttctctattttcaaatgagatttgttcaagtttcaaaaccacgtgaaataataaatgtatagtagttttcttttccttgggcattgctwgatatgtgaaatgggtttatgaaaaataataaaatcataacgctatttgtttgactttcaatttcatgggaatttttctcagctaaactctaaatggtgattargcaaaaaaaaaaaaaaaaaacygraggggggcccggtaccaattcgccctataatga

SEQ ID NO: 89 - DNA, 1102 bp, Homo sapiens
ttttttttttaccatttaaaataaaatgaaagtgaccttctgtttataaaaatctttgtctgcatctctgcttatttccttagaagagattccaagaagcggtgagtgatttcacggcagcagagggttgggacatattacgggcgcggatccctcttggagtgagatgactctccggagagatttagtcgtcaccctcgcgtgtgaggctgcgtcacaccccagggatgtgtctatcaagatggaagatcttttacacgctcttgattttgtttgcctttttttctattactagtgagaatgaaactttttatatgattattatccatcataatccaacacaaattactgcttcatgttcttttactttcctgtgaaggttttagtgccttttaaaaattgctatatattaagcttgttaatacttccatgctgtatttgtggccatcagtttccccgggcacaggcctgcacattttgccttcacacgctgggtggtttttcattttcacttctatttctcgttcttctatcgttttatgttcagacgggtttctccgtgtagaaagcagtttatgaagatttactttcgacagtcttctctctactttctacagtgaattctctgaygtgtctgggagtwtgggggtctgggtaagartcctcctctcaccctattctctattacgatccacagcctcatgctttatgarattggtggccgggarcgggggagatttgcggatcccccaagccagactttatccccctatccctgcctctggatcccacgtacaggcctgggaactccctgtgggtaggggccaatggtctcgcactctcacctgtaccccagggctggcacaggatggtcaaggagagaggctgcccaagcgcatccytctggtgtccccctgacacgcctccaaagtgagcaggtaggtttcaacagccccacgttgcaggtgggagatgaagctcagggtggagaccagtatctcacagttctctttgcatggccgggtacttgttagtcaactgatcaagtgaaaattctagccccagaggcaggagaatccggaacaaaattaaaccagccagg

SEQ ID NO: 90 - DNA, 1533 bp, Homo sapiens
  SITE (12): n equals a,t,g, or c
  SITE (123): n equals a,t,g, or c
  SITE (1522): n equals a,t,g, or c
  SITE (1527): n equals a,t,g, or c
ggcacgagccgncacgggcagcgccccatagcgccagggaccccctggcagcgggagccgcgggtcgaggttatggatccagcgggcggcccccggggcgtgctcccgcggccctgccggtgnctggtgctgctgaacccgcgcggcggcaagggcaaggccttgcagctcttccggagtcacgtgcagccccttttggctgaggctgaaatctccttcacgctgatgctcactgagcggcggaaccacgcgcgggarctggtgcggtcggaggagctgggccgctggracgctctggtggtcatgtytggagacgggctgatgcacgaggtggtgaacgggcttcatggagcggcctgactgggagaccgccatccagaagcccctgtgtagcctcccagcaggctctggcaacgcsctggcagcttccttraaccattatgctggctatragcaggtcaccaatgaagacctcctgaccaactgcacgctattgctgtgccgccggctgctgtcacccatgaacctgctgtctctgcacacggcttcggggctgcgcctcttctctgtgctcagcctggcctggggcttcattgctgatgtggacctagagagtgagaagtatcggcgtctgggggagatgcgcttcactctgggcaccttcctgcgtctggcagccctgcgcacctaccgcggccgactggcctacctccctgtaggaagagtgggttccaagacacctgcctcccccgttgtggtccagcagggcccggtagatgcacaccttgtgccactggaggagccagtgccctctcactggacagtggtgcccgacgaggactttgtgctagtcctggcactgctgcactcgcacctgggcagtgagatgtttgctgcacccatgggccgctgtgcagctggcgtcatgcatctgttctacgtgcgggcgggagtgtctcgtgccatgctgctgcgcctcttcctggccatggagaagggcaggcatatggagtatgaatgcccctacttggtatatgtgcccgtggtcgccttccgcttggagcccaaggatgggaaaggtgtgtttgcagtggatggggaattgatggttagcgaggccgtgcagggccaggtgcacccaaactacttctggatggtcagcggttgcgtggagcccccgcccagctggaagccccagcagatgccaccgccagaagagcccttatgacccctgggccgcgctgtgccttagtgtctacttgcaggacccttcctccttccctagggctgcagggcctgtccacagctcctgtgggggtggaggagactcctctggagaagggtgagaaggtggaggctatgctttggggggacaggccagaatgaagtcctgggtcaggagcccagctggctgggcccagctgcctatgtaaggccttctagtttgttctgagacccccaccccacgaaccaaatccaaataaagtgacattcccaaaaaaaaaaaaaaaaaaaaaaaaancccgngggggg

SEQ ID NO: 91 - DNA, 575 bp, Homo sapiens
atcctctggaatctaggtggaagccaccaagccttcttcacacttgcgttctgagcatctgcagacttaaccccatgtggcaatcaccaaggcttatggcttgtgtcctccagaactgtggccagagctgtacctgggcccctttgagctgaggctgaagccagagtctgaagctcagcagggcagtarggccctgggcctggcccctgaaaccattcttttctcctaagcctctgggcctttgatgggargggctgtcctcaagatttttgaaatgcctttggagggtttttgccttgtcttggatattggcttccttttagttatgctcatctctctagcaagtgaatgtttcacaacctgcttggattctttctctaccacagarccaggctgcaaattttacaaacttttacactctgtttcccttttaaatataaatttcaatgttaagtcacttctttgctcccatatctgatttaggttgctggaagtagccaagtcacctcttgaatgctttgctgcttagaaatttcctctactaggtagcctgggtcatcacacttaagttcaaa

SEQ ID NO: 92 - DNA, 639 bp, Homo sapiens
  SITE (62): n equals a,t,g, or c
  SITE (126): n equals a,t,g, or c
tcctttcatcttaagcaccacccgacagggcaggtactattaccatctccgtttgacagatnaggaacctggcacaggaagcatttaagtggattccccaggatcgccccactgtcaggagcagantcagaatgggcctcagcatcaggctcccaatcctggcttctaactgctgcgctctgcccttcyctcwccccacctccccactccagtgcctttggtcatgccactgcagctttcaggccaatactggattagcctcttagtgttcttgtccctgcagccatttccccaggcagcaattccatgtgccctcactgatgtaggtggctcttgtgtcatttgtcacatcctattgaattgtttatgcatcttgttcacactcacagcaccctccctctcacacgtcctccttataaaaatgtccctcagtgtctgctatgagccaggtgcagacttaagtgacagggctgctacgggaaataaaaaattaacaaggagcacctgcctcttaatgcacagtaacaaactatgttaagtgtcaggaaggaaaggttaaggatgccaggaaggcttttaataaataacctgacttagatgggcaggtggtgctgargattaagaacgtgttcttctcga

SEQ ID NO: 93 - DNA, 858 bp, Homo sapiens
cccccgggctgcaggaattcggcacgagagtggctggagtctggctgcagagggaagacatcagcagggagggagccagggcctgtcacatctttcctctggccattgtcctggtctttgtaagcccagaatctccccttccctgaagggaggccagcaccccaggagggcagcaggtgtgctgtgagggttggagtagtgtgagaggtcagggtacactagaatggccatggacaccatgtgggggtgctctgggctgggccacagaacagtgtccttcctgctgctcctcccctgcagcttcccccgaccttgtggtttatttggtttgataccaatcagcagaccctgcaaggtggaggctcccaggcctctcagtcccaccactctcatgtgccagtcacccctactgtaactgcccaatgagtacttcttgcccactgccaagatagagccagtttaccaagacaggggaattgcagtagagaaagagttgaatatacatagagccagctaaatgggagagtggagttttcttattacttaaatcagcctcccctaaaattcagaggtgagaatttttcaaggacagtttggtgggcagggcctagggaatggatgctgctgattggctagggatgcaatcataggggtgtagaaaaggtccttgtgcactgagtccacttttgggtgagagctaccaaggagctgctggtctgctggtcccggtagagccatctggtgtcaggaatgcaaaagtgtggccaggcacagtggcccacacttgtaatcctagcactttgggaggctgaggcaggaggaatgcttgagcccaggagctcgagggggggcccggta

SEQ ID NO: 94 - DNA, 526 bp, Homo sapiens
gcaggggaattcggccacggaggggtttcaacagggcccgtggggtgaggtgcaracacaaagcccataagtgctggcctgttgggacaaatgagagaaatcccatagggtggtgatgacagcgcaytcagccatcytaytcctggggaaaatgaaacttgtgctcctatcaaatgctcagttgtaaaactggaaaaaaattttagaagacatcttgtccagcatctgtgtttatgtctataaaatgtagaaaactaaagcacagagatgttaaatgttttgtccaaggtccaacagctggttagcargcttggtctggtgacctttctactgaaccacagtgccgctgggggaagtcctcagcacagatggctgctgctatagctggggtatgggcagtattagtagttaaccagtcaacccaagttcccatagtctaggttctgcttcagctggaggttagggaaaaacacaagaaaatcccttaccactctaccagtgctgggggatgtactaagagatcccc

SEQ ID NO: 95 - DNA, 426 bp, Homo sapiens
ggcacagggcaggagagacttggtccatggggagaagcctgcagtatagatgggacctccaggagcccaagtagcatagaccctgctgatccggggccattgagccagaggatttgggctgaatgtccccagagacaaaagggaaaggtagatcctttcccttaaagatgaaagccatcgcccgggcttgcttattgctctctctcctggtccttccacatgttgtttctgaacatttgttctggcatcacaatccccgtcatcctgtcatctggcccttcccacctttccaccttatctcttgcagtgtctccgcgtcgacctggcacctgggtgaargcttgctcttgctggtgcccatagcccccagtgtatggtcttgamctccccagccatatggaracccacctcaggagggcccctcga

SEQ ID NO: 96 - DNA, 844 bp, Homo sapiens
  SITE (416): n equals a,t,g, or c
  SITE (471): n equals a,t,g, or c
  SITE (490): n equals a,t,g, or c
  SITE (732): n equals a,t,g, or c
  SITE (835): n equals a,t,g, or c
ggcacagcggcacgagataggaagcttggcaggggcagctcccccagtgcgcattgccctgtaactcgagcgcctgggagtggggagaggcttggaaatggagcagggtggtggacctcgtcttctcctgctcatcccaggcctcctccataacacctacctagcacggcctggggacttcccagcccaaggaacaactgagaatactgagtgccagggtagccctagccccatttcacacctgggcaaagtgaggtcactggattcaaacactcagatttaaacctcctctgtgtctgcagcacctgtatataactgccagcctctgctgcccctctccaaaaagtctctgcccttgtctttggcacctgtctctgtcctccccattctctgctcctcctttctccaactcagantcaccctgttagttcagcaaatgttcatcgagctccataatgtagcaggacaggnctgtctaacagattctggncttgcaagggtgagacaagtactctccatctttctctcatcttcacagatggtctgctcaacaactttgcactgaattgtaaataattgatactgcataaaacattgatgttctttaagggtagtccagcaaggtggcaagtcttataatgataactgctcaaggatctctcagtgaagcatttggggstgctagctctgcctatgggtgaggtcagctatctcacgccatctacttccacntgcccccccatgccaggctcaccctgagctgagatgcctgagcaggtggcagaaaggagccacctggtttatgcttcgggaccacaaactcctctatccagangacagtttt

SEQ ID NO: 97 - DNA, 1985 bp, Homo sapiens
  SITE (332): n equals a,t,g, or c
agccctgctgaagtacaggttcttctatcagtttctgttgggcaatgaacgagcaacagcaaaggagatcagggatgaatatgtggagacgctgagcaagatttacctgtcttactaccgctcttacctggggcggctcatgaaggtgcagtatgaggaagtcgctgagaaagatgatctaatgggtgtggaagatacagcaaagaaaggattctyctcaaagccatcgctccgcagcaggaacaccattttcaccctaggaacccgcggctctgtcatctcccccactgaacttgaggcccccatcctggtgcctcacacagcgcagcggnagagcagaggtatccatttgaggccctcttccgcagccagcactacgscctcctagacaattcctgccgcgaataccttttcatctgtgaattttttgttgtgtctggcccagytgcacacgacctgttccatgctgtcatgggccgtacactcagcatgaccctgaaacacctggattcttatctagctgactgctacgatgccattgctgtttttctctgtatccacattgttctccggttccgtaacattgcagcaaagagggatgttcctgccctggacaggtactggggaacaggtgcttgccttgctatggccacggtttgaactgatcctggagatgaatgttcagagcgtccgaagcactgacccccagcgcctaggggggttggatactcggccccactatatcacacgccgctatgcagagttctcctccgctcttgtcagtatcaaccagacaattcctaatgaacggaccatgcaattgctgggacagctgcaggtggaggtggagaattttgtcctccgagtggcagctgagttctcctcaaggaaggagcagcttgtgtttctgatcaacaactatgacatgatgctgggtgtgctgatggagcgggctgcagatgacagcaaagaggttgagagcttccagcagctgctcaatgctcggacacaggaattcattgaagagttgctgtctcccccttttgggggtttagtggcatttgtgaaggaggctgaggctttgattgagcgtggacaggctgagcgacttcgaggggaagaagcccgggtaactcagctgatccgtggctttggtagttcctggaaatcatcagtggaatctctgagtcaggatgtaatgcggagtttcaccaacttcagaaatggcaccagtatcattcagggagcgctgacccagctgatccagctctatcatcgcttccaccgggtgctgtcccagccgcagctccgagccctccctgcccgggctgagctcatcaacattcaccaccttatggtggagctcaagaagcataagcccaacttctgatgtgccagaaaccgccctgagatctgccggtcatctccatggacttctgcaccccattccatacccttcttcacctggggtaccccttccagttttccccttgcttcccaggcccttgacatggcttacctgccttcactcccagcaccttgcccaacaggataagctggatccccttggccttctgaatatcccagtgtcttcaggtttcccaagaccacttccctgtgggcttccaaaatggcctttatcatttctccagtctgtcaccctcctttcctgctcccatacacccaaggcttgtttcttcccctgtaaaaaccactgcctcaatctctggttcactcaactagtcaccatgtcctgaggcatgaagcctcctcagctcttggaattgctggcaaggggtgactgcctctgagtcattgtgtttttcaaagtgatttcttttctgtagctttttgacctaagatctcagcaatttgaacactaacctctcccctcctggctcaagaattactccgaagtcagtctgcagaaaataaatatttagtatgacatgaaaaaaaaaaaaaaaaaaaaaaaaaaaaaaaaa

SEQ ID NO: 98 - DNA, 1416 bp, Homo sapiens
atatgaagggaaagaatttgattatgttttctcaattgatgtcaatgaaggtggaccatcatataaattgccatataataccagtgatgacccttggttaactgcatacaacttcttacagaagaatgatttgaatcctatgtttctggatcaagtagctaaatttattattgataacacaaaaggtcaaatgttgggacttgggaatcccagcttttcagatccatttacaggtggtggtcggtatgttccgggctcttcgggatcttctaacacactacccacagcagatccttttacaggtgctggtcgttatgtaccaggttctgcaagtatgggaactaccatggccggagttgatccatttacagggaatagtgcctaccgatcagctgcatctaaaacaatgaatatttatttccctaaaaaagaggctgtcacatttgaccaagcaaaccctacacaaatattaggtaaactgaaggaacttaatggaactgcacctgaagagaagaagttaactgaggatgacttgatacttcttgagaagatactgtctctaatatgtaatagttcttcagaaaaacccacagtccagcaacttcagattttgtggaaagctattaactgtcctgaagatattgtctttcctgcacttgacattcttcggttgtcaattaaacaccccagtgtgaatgagaacttctgcaatgaaaaggaaggggctcagttcagcagtcatcttatcaatcttctgaaccctaaaggaaagccagcaaaccagctgcttgctctcaggactttttgcaattgttttgttggccaggcaggacaaaaactcatgatgtcccagagggaatcactgatgtcccatgcaatagaactgaaatcagggagcaataagaacattcacattgctctggctacattggccctgaactattctgtttgttttcataaagaccataacattgaagggaaagcccaatgtttgtcactaattagcacaatcttggaagtagtacaagacctagaagccacttttagacttcttgtggctcttggaacacttatcagtgatgattcaaatgctgtacaattagccaagtctttaggtgttgattctcaaataaaaaagtattcctcagtatcagaaccagctaaagtaagtgaatgctgtagatttatcctaaatttgctgtagcagtggggaagagggacggatatttttaattgattagtgtttttttcctcacatttgacatgactgataacagataattaaaaaaagagaatacggtggattaagtaaaattttacatcttgtaaagtggtggggaggggaaacagaaataaaatttttgcactgctgaaaaaaaaaaaaaaaaaaaaaaggaaactcgagggggggcccgg

SEQ ID NO: 99 - DNA, 1760 bp, Homo sapiens
  SITE (24): n equals a,t,g, or c
  SITE (39): n equals a,t,g, or c
  SITE (255): n equals a,t,g, or c
gccttcaactcttgttttattganttatgaattcttaantcttctatggcaggagacatctatggggaggctttgtttgttttttgagacagggtctcatttgtcgcccagggtgagactctgtctcaaaaaaataaaataaaataaaataaaaacaaagaaaaaaaaataaaatctttaggcattcccagacacaaagatctcagagacagacaacagagagcytccgtgttcatctgcccgaggctgtttgtncacagttcccttaaaagatgcctggaaatgctcccaacaacaagggactcaagtatggggctgagtttgttaaaaaagcagctaaatgtgtttaggaaacacacgaagtgaaaccagacagtgatggcccatgtacaagacttgtgcttgaagctttggtgtgcctccatggccaatttttcaggcaccaaaacccattcctgattaattattgttaaaaaagcagctaaatgtgtttaggaaacacacgaagtgaaaccagacagtgatggcccatgtacaagacttgtgcttgaagctttggtgtgcctccatggccaatttttcaggcaccaaaacccattcctgattaattattgatatacaatgcaaaccaaactatgaaaacacagactttttttcagaagagggaaataaaggcacagaaacctgccaaaatagatatttttttccataagaatagtatggttgattaaaatagtttatcactagtaaaacttgtatcactagagcagacaatacaaattagttttttaaaaaatgacattcactgaattcttggtctgtgcattcaatgtgaataatcatcaaaaatatattacaattaaaggtttgtaaggagctctgtctgggatttctgcagtatattatttcggaggagaagaaccaccataaagtatgagctatccactgttcctttttatgtcatgtatggtaatcagtctatctcctaatgcaggctcacaaacttccacggtgagatgtctaagtgacttagtgaccttcacactcattaaaggcagccctgtccatcaaactccatacctagaaagttcaataaactgtattacattttaataaatatktctgtgtactttttgttttttgcttttaagctcagcttaaattttgtcaaggaaaccatttcacaagacagtatgtcacagcctactatcagcaatagtccttgtttattagaatctgcagatgtccatattacatcaaatataaatatatattatatttacatttccttcttagctttcaatttaggtgagtgtatttatagataatgccactaacgcaccactattctaatcctcagtgcaactcataccttctttccattagatgctcattaatgtaagacagcatcttaaaagaggggtactgttcttttttaaaataaaaggaaagaaagggaatccaagaatggaggtctagacatttcctaagagatttttgttttgttttttatacttagaaatacttgaaaaatgtggtccctttttgtagtactagtctctacttggggacaagaaaatagaatatgcaactcagaaaggaaagascccaaagamgararaacctgcttgtttactccattaacctgtttaattaagatctgcttttaaatgcctgatgctgtgccagtatcatacaaaacatcttccaccttccaagcagctgaagcacctcctcaaaattctgtttgtcctgaataa

SEQ ID NO: 100 - DNA, 599 bp, Homo sapiens
gaattcggcacgagcgtccacgcagccgccggccggccagcacccagggccctgcatgccaggtcgttggaggtggcagcgagacatgcacccggcccggaagctcctcagcctcctcttcctcatcctgatgggcactgaactcactcaagactccgctgcccccgactccctgctgagaagttcaaagggcagcacgagggggtctttggctgctattgtcatctggagggggaagagtgagagccggatagccaagaccccaggcattttcagaggtggcgggaccttagtcctacccccaacacacacccctgagtggctcatcctccctttgggcataacgctgcccttgggggctccagaaacaggcggtggggattgtgccgctgagacctggaagggcagccagcgtgccggccagctgtgtgcattgctggcttaatatgcagggcttggggggctgtggccacatgcccggcaggaggtgagtgaggagccctgtggcgtgctggtgtggggatcgtgggcatttcaaacgggcttgtcgtaccctgaacaatgtatcaatagagaaaaaaaaaaaaaaaaaaactcga

SEQ ID NO: 101 - DNA, 784 bp, Homo sapiens
gaattcggcacagaaaaaaaagagagactgggtcttactgtgttgcccagacttgtcttgaactcctgcctcagcctctcaagtacttgggattataggccaagaagccaccatgcctagcttcttcctgtcattgatccagactaatactctggggtcagcctcatttcttctctttctcactttgcacatccacttgtcaccaaatckrgttcattctgcatcctaagtaagtcctttgattcctccagttgttcattagtaatgtctcaartgtaattttttctagtagttttcagcctgtctttcckgccttcagtcttaacttctccagtacatakgccacattgttgtcagcakgatcawattttatttaaaaatactttacawakgtttatkgccaaatattagraaatacagattcatggaaagaaaaatcactgtcccaaggaggtcactggcatggtgaggttaaggggtgattttaatttttaaaaatgtatattttttcctgtgtagagtagtaacacccttgaaaacacawtcccttgtaaagtctctaattctgtactccgcatctagstgrtctcttctttctcagatattttacaatttcatttatcaccacctttctctagcctttacccgtctcttcaatattwacatatgcagaagtttctcctaacaaacacctgcctctgcctcagttctgctaccaccctgttgctttctttcccttcacaatcaaatttaagagtgtcaaaaaaaaaaaaaaaaaactcga

SEQ ID NO: 102 - DNA, 404 bp, Homo sapiens
ggcacgagttataaaattgagactgatgaaacatcaatactagagcccatgaggatgaaagaaattatcaaatagtgctgaacagaataagatgttaacgctgagttattaggactggaaggctatgaaaagaacttgaaattgtcggaatatgtgctctcttcatgtcatattcaatagaagtttctagtttaagattgattttgtgttttcttaggcatttcaagtgacaagcaaagtaaatgtatatattatgtgataaatcatgttttcaagaacgtcaaatttctggacttttttctttcaatttttaatttttaaagtttttttggtattaaaaaatctattcacaagccaaaaaatatataaaatatacagcgaaaagccaaaaaaaaaaaaaaaaa

SEQ ID NO: 103 - DNA, 760 bp, Homo sapiens
  SITE (438): n equals a,t,g, or c
  SITE (741): n equals a,t,g, or c
gggtcgacccacgcgtccgctgaccagtccgttatagatacttcttcctataccaaaactgtttaaacaggtgccaccacaagggatgtcgtccttactctctgcgggtcttcaagcatccctttgtgggaaargtctctgggcaagcacgtggtatttggtctgctgcttgcttccctttttccaccagggatgttgtgatcataagtcaaaacaacagtatattccaaatctcaaaagctattgtggcctgagcacaattgaaatctagcagagtttttcctatgtagctttagagtaactcttctgcttctctgtcacttacaattcaggttctgcctttgcctaagagcatgagcagaagagtcctcatgtgacgcttagttctattgcagtcctgggtgaaactatttaagcwatggggctgctkctccccanwtcctccctaacaattcgttgtgtggacttctcatctaaaaggttagtggcttttgcttgggatcagtgctctctattgatgttcttgctggtctccagacacattcctgttgcattaagacttgaaagacttgtagatgtgtgatgttcaggcacaggatgctgaaagctatgttactattcttagtttgtaaattgtccttttgataccatcatcttgttttctttttgtaggtataaataaaaacactgttgacaataaaaaaaaaaaaaaaaaaaaaaaaaaaaaaaaaaaaaaaaaanaaaaaaaaaaaaaaaaaaa

SEQ ID NO: 104 - DNA, 1351 bp, Homo sapiens
  SITE (544): n equals a,t,g, or c
  SITE (774): n equals a,t,g, or c
cttcacagactgacagaatggttttgttttgttttgttttgttttgttttgtttttgagatggactctagctctgtcacccaggctggagtgcagtggtgcgatctcggctcactgcaagctccgcctcccgggttctcaccattctcctgcctcagcctcccgagtagctgggactacaggcgcccaccaccacgcccggctaattttttgtattttttagtagagacggggtttcaccatgttagccaggatggtctcgatctcctgacctcgtgatccgcccgcytcggcctcccaaagtgctgggattacaggcgtgagccaccgtgcctgccccagaatggtttttaaagccacagttgagargccacccattgcccggcgcctggacagtgatcatcttgttcatcttgttcagtcctttcttgtgtgattggaattattcatcccctttgaaagatgagaaggttgagatgcaaagagtctacctttccaagttctcactgctggaaagarctagaagcacagttcaaagttctggnttctggactctgcagtccaggtytcccttytcccacttgcctaccctcaatgccacactgtttttgaagtggcccataacttgaaggraaagtttaaagacagttcaatttaatcatcagratgcattcttttttttttcggaracggaktttcactcttgctgcccasgctggagtgcaatggtgcaatgatctcggctcactgcaacctatgcctcctgggttcaagngattatccagcctcagcctcccgagtagctgggattatgggcgcccaccaccatgcccagctaatttttgtatttttttttttagtagagatggggtttcgccaggttggccaggctgktcttgtgaaytcctggcytcaggtgatytgcccacytcatcytccaaaagtgctgggattacaggcatgagccactgcgcctggcytcagaatgcattcttacacatctatcctagacatttataagcactctaatggataacaatccaagaataaatgattgtaaaagatgatgccgaagagttgatgtcaatctttttttcctaagaaaaaaagtccgcgagtattaaatatttagatcaatgtttataaaatgattactttgtatatctcattattcctattttggaataaaaactgaccttctttaatcatatacttgtcttttgtaaatagcagcttttgtgtcattctccccactttattagttaatttaaattggaaaaaaccctcaaactaatattcttgtctgttccagtcttataaataaaacttataatgcatgtaaaaaaaaaaaa

SEQ ID NO: 105 - DNA, 2066 bp, Homo sapiens
ggcacgaggcggcggagggccacaatcacagctccgggcattgggggaacccgagccggctgcgccgggggaatccgtgcgggcgccttccgtcccggtcccatcctcgccgcgctccagcacctctgaagttttgcagcgcccagaaaggaggcgaggaaggagggagtgtgtgagaggagggagcaaaaagctcaccctaaaacatttatttcaaggagaaaagaaaaagggggggcgcaaaaatggctggggcaattatagaaaacatgagcaccaagaagctgtgcattgttggtgggattctgctcgtgttccaaatcatcgcctttctggtgggaggcttgattgctccagggcccacaacggcagtgtcctacatgtcggtgaaatgtgtggatgcccgtaagaaccatcacaagacaaaatggttcgtgccttggggacccaatcattgtgacaagatccgagacattgaagaggcaattccaagggaaattgaagccaatgacatcgtgttttctgttcacattcccctcccccacatggagatgagtccttggttccaattcatgctgtttatcctgcagctggacattgccttcaagctaaacaaccaaatcagagaaaatgcagaagtctccatggacgtttccctggcttaccgtgatgacgcatttgctgagtggactgaaatggcccatgaaagagtaccacggaaactcaaatgcaccttcacatctcccaagactccagagcatgagggccgttactatgaatgtgatgtccttcctttcatggaaattgggtctgtggcccataagttttaccttttaaacatccggctgcctgtgaatgagaagaagaaaatcaatgtgggaattggggagataaaggatatccggttggtggggatccaccaaaatggaggcttcaccaaggtgtggtttgccatgaagaccttccttacgcccagcatcttcatcattatggtgtggtattggaggaggatcaccatgatgtcccgacccccagtgcttctggaaaaagtcatctttgcccttgggatttccatgacctttatcaatatcccagtggaatggttttccatcgggtttgactggacctggatgctgctgtttggtgacatccgacagggcatcttctatgcgatgcttctgtccttctggatcatcttctgtggcgagcacatgatggatcagcacgagcggaaccacattgcagggtattggaagcaagtcggacccattgccgttggctccttctgcctcttcatatttgacatgtgtgagagaggggtacaactcacgaatcccttctacagtatctggactacagacattggaacagagctggccatggccttcatcatcgtggctggaatctgcctctgcctctacttcctgtttctatgcttcatggtatttcaggtgtttcggaacatcagtgggaagcagtccagcctgccagctatgagcaaagtccggcggctacactatgaggggctaatttttaggttcaagttcctcatgcttatcaccttggcctgcgctgccatgactgtcatcttcttcatcgttagtcaggtaacggaaggccattggaaatggggcggcgtcacagtccaagtgaacagtgcctttttcacaggcatctatgggatgtggaatctgtatgtctttgctctgatgttcttgtatgcaccatcccataaaaactatggagaagaccagtccaatggaatgcaactcccatgtaaatcgagggaagattgtgctttgtttgtttcggaactttatcaagaattgttcagcgcttcgaaatattccttcatcaatgacaacgcagcttctggtatttgagtcaacaaggcaacacatgtttatcagctttgcatttgcagttgtcacagtcacattgattgtacttgtatacgcacacaaatacactcatttagcctttatctcaaaatgttaaatataaggaaaaaagcgtcaacaataaatattcttgagtataaaaaaaaaaaaaaaaaaaaaaaaaaa

SEQ ID NO: 106 - DNA, 1705 bp, Homo sapiens
  SITE (724): n equals a,t,g, or c
aattcggcakagggcagctgtcggctggaaggaactggtctgctcacacttgctggcttgcgcatcaggactggctttatctcctgactcacggtgcaaaggtgcactctgcgaacgttaagtccgtccccagcgcttggaatcctacggcccccacagccggatcccctcagccttccaggtcctcaactcccgyggacgctgaacaatggcctccatggggctacaggtaatgggcatcgcgctggccgtcctgggctggctggccgtcatgctgtgctgcgcgctgcccatgtggcgcgtgacggccttcatcggcagcaacattgtcacctcgcagaccatctgggagggcctatggatgaactgcgtggtgcagagcaccggccagatgcagtgcaaggtgtacgactcgctgctggcactgccgcaggacctgcaggcggcccgcgccctcgtcatcatcagcatcatcgtggctgctctgggcgtgctgctgtccgtggtggggggcaagtgtaccaactgcctggaggatgaaagcgccaaggccaagaccatgatcgtggcgggcgtggtgttcctgttggccggccttatggtgatagtgccggtgtcctggacggcccacaacatcatccaagacttctacaatccgctggtggcctccgggcagaagcgggagatgggtgcctcgctctacgtcggctgggccgcctccggnctgctgctccttggcggggggctgctttgctgcaactgtccaccccgcacagacaagccttactccgccaagtattctgctgcccgctctgctgctgccagcaactacgtgtaaggtgccacggctccactctgttcctctctgctttgttcttccctggactgagctcagcgcaggctgtgaccccaggagggccctgccacgggccactggctgctggggactggggactgggcagagactgagccaggcaggaaggcagcagccttcagcctctctggcccactcggacaacttcccaaggccgcctcctgctagcaagaacagagtccaccctcctctggatattggggagggacggaagtgacagggtgtggtggtggagtggggagctggcttctgctggccaggatggcttaaccctgactttgggatctgcctgcatcggtgttggccactgtccccatttacattttccccactctgtctgcctgcatctcctctgttgcgggtaggccttgatatcacctctgggactgtgccttgctcaccgaaacccgcgcccaggagtatggctgaggccttgcccacccacctgcctgggaagtgcagagtggatggacgggtttagaggggaggggcgaaggtgctgtaaacaggtttgggcagtggtgggggagggggccagagaggcggctcaggttgcccagctctgtggcctcaggactctctgcctcacccgcttcagcccagggcccctggagactgatcccctctgagtcctctgccccttccaaggacactaatgagcctgggagggtggcagggaggaggggacagcttcacccttggaagtcctggggtttttcctcttccttctttgtggtttctgttttgtaatttaagaagagctattcatcactgtaattattattattttctacaataaatgggacctgtgcacaggraaaaaaaaaaaag

SEQ ID NO: 107 - DNA, 1167 bp, Homo sapiens
  SITE (1): n equals a,t,g, or c
  SITE (6): n equals a,t,g, or c
nggagntccaccgcggtggcggccgctctagaactagtggatcccccgggctgcaggaattcggcacgaggccaccaaccgtggcatcacgcgaatccggggcaccagctaccagagccctcacggcatccccatagacctgctggacaggcgccatgtcactctccagggcccggttgaggaaggagaagctctcgatgtccagcatgtggacctcgtcgatgaacagcactccagggatgatctccgccttgccctcctcgcgccactcagccaccttggcattgatctgctcacggacttctgacttgatctcccctgtgtcacctgagaagagcgccaggaagccctgggtgcgagagttgatgacgtcgatctcgtgcagggacacggtgtgcaccacctccttgcgtttctggagctccccatctgggcactgcacgaacttggtctgggagcccatagcgtcgtagttcgcgggcgcgtgtgaaggagcggcccagcttggagatcttgcccgtcgccttgtcgatggtgatcacgtccccggcctggaccttgtccttggtcagggamtcaatcatcttggtgcccaggtcgtagatggtctccatctctgtggtcttgagggtcagtttgcccaccttggagcccgtccctgttgctggtcgatcaatctggatctccaccacctccccttcgatgatctccgtctcctccttgatgcgaacgccgatggaccgccggaaggcctgcgtcagcgcctcggtcttgctcatctccagggagaagatttcactgccggcgatggctgtgaatggcgtgtcagggcccagggcctgcgccatgcccatggcgatggccgtcttccccgtgcccggctggccagcaataaggactgcccgaccggcaatcttcccttcccggatcatctccagcaccacgccagccgcccgccgtgccgccagctgacccaccatgccttgcgaagcctgccgaggctccaaggcatcgtccagccccagtccccggatgtgggagtgggcaccgattcgctcaatccttgttacatcacggatctccgggactttggttgtggctgtaacggttgccatgatgctcaccaactgccagagtctagcggaaaacctctgccgaattcctgca

SEQ ID NO: 108 - DNA, 1907 bp, Homo sapiens
ggcacaggggaatcatcgtgtgatgtgtgtgctgcctttgtgagtgtgtggagtcctgctcaggtgttaggtacagtgtgtttgatcgtggtggcttgaggggaacccttgttcagagctgtgactgcggctgcactcagagaagctgcccttggctgctcgtagcgccgggccttctctcctcgtcatcatccagagcagccagtgtccgggaggcagaaggtaccggggcagctactggaggactgtgcgggcctgcctgggctgccccctccgccgtggggccctgttgctgctgtccatctatttctactactccctcccaaatgcggtcggcccgcccttcacttggatgcttgccctcctgggcctctcgcaggcactgaacatcctcctgggcctcaagggcctggccccagctgagatctctgcagtgtgtgaaaaagggaatttcaacgtggcccatgggctggcatggtcatattacatcggatatctgcggctgatcctgccagagctccaggcccggattcgaacttacaatcagcattacaacaacctgctacggggtgcagtgagccagcggctgtatattctcctcccattggactgtggggtgcctgataacctgagtatggctgaccccaacattcgcttcctggataaactgccccagcagaccggtgaccgtgctggcatcaaggatcgggtttacagcaacagcatctatgagcttctggagaacgggcagcgggcgggcacctgtgtcctggagtacgccacccccttgcagactttgtttgccatgtcacaatacagtcaagctggctttagcggggaggataggcttgagcaggccaaactcttctgccggacacttgaggacatcctggcagatgcccctgagtctcagaacaactgccgcctcattgcctaccaggaacctgcagatgacagcagcttctcgctgtcccaggaggttctccggcacctgcggcaggaggaaaaggaagaggttactgtgggcagcttgaagacctcagcggtgcccagtacctccacgatgtcccaagagcctgagctcctcatcagtggaatggaaaagcccctccctctccgcacggatttctcttgagacccagggtcaccaggccagagcctccagtggtctccaagcctctggactgggggctctcttcagtggctgaatgtccagcagagctatttccttccacagggggccttgcagggaagggtccaggacttgacatcttaagatgcgtcttgtccccttgggccagtcatttcccctctctgagcctcggtgtcttcaacctgtgaaatgggatcataatcactgccttacctccctcacggttgttgtgaggactgagtgtgtggaagtttttcataaactttggatgctagtgtacttagggggtgtgccaggtgtctttcatggggccttccagacccactccccacccttctccccttcctttgcccggggacgccgaactctctcaatggtatcaacaggctccttcgccctctggctcctggtcatgttccattattggggagccccagcagaagaatggagaggaggaggaggctgagtttggggtattgaatcccccggctcccaccctgcagcatcaaggttgctatggactctcctgccgggcaactcttgcgtaatcatgactatctctaggattctggcaccacttccttccctggccccttaagcctagctgtgtatcggcacccccaccccactagagtactccctctcacttgcggtttccttatactccacccctttctcaacggtccttttttaaagcacatctcagattaaaaaaaaaaaaaaaaaaaaaaaaaaaaaaaaaaagggcggccgc

SEQ ID NO: 109 - DNA, 611 bp, Homo sapiens
  SITE (19): n equals a,t,g, or c
  SITE (21): n equals a,t,g, or c
  SITE (47): n equals a,t,g, or c
  SITE (607): n equals a,t,g, or c
  SITE (610): n equals a,t,g, or c
atgaattaacgccaagctntnaatagggactcactatgggggaaagntgggtaacgcctgcaggtaccgttccggaattcccgggtcgacccacgcgtccgatggggctttagtaaatcaggcttgcaggctcaaagctgcaatctgcccactctcaggtactgagactttgtgggcctcagacaccaggaagaaagttgggatacagtcatttgagttaaaaagggaatgacccctcagaaacccgcattagcagtgttactcttggaagtgcctttacttttaacgctctctgttctgaaaaagaggtgtttggttacgtgtgagccaacatcacgttttgttagctgtgatttacctttgtccgtttaaaagacttcacggagccattctgtatacaaggtgtgctctttccaatgtagaaggggttatggaaaagggtgcgatcctttgctgtaaactggagagaccagtcccaaacagaggggaattttaagcccttctcatcacccaattggatgtttttgcttatagcaaattcctgcaaaataaataaataaatatttgcaaaactaaaaaaaaaaaaaaaaaaaaaaaaaaggggggnccnc

SEQ ID NO: 110 - DNA, 2632 bp, Homo sapiens
  SITE (67): n equals a,t,g, or c
  SITE (2620): n equals a,t,g, or c
tcccagctctcaggacaagggccctgggcgatcttttaaaaaagccgattgggtgtctttctaaaantacaaccagtacttcatcgtcaagtttctgggaagggagtcccctccagattctcatggagtgacaaatcttgactcttgctcctggaatttttcaggcccaaactagcgtttctacaatgatttatttggcaaatttgtcttgattatgggtggctgatgaggaacgtgcttttgttaggaaccgaaactgggcggcggtgagggcgtgtacgcaatgagtccggaagagggtgaaatgctttcggtaggcactccacggctgtgaagatggcggcggctgcgtggcttcaggtgttgcctgtcattcttctgcttctgggagctcacccgtcaccactgtcgtttttcagtgcgggaccggcaaccgtagctgctgccgaccggtccaaatggcacattccgataccgtcggggaaaaattattttagttttggaaagatcctcttcagaaataccactatcttcctgaagtttgatggagaaccttgtgacctgtctttgaatataacctggtatctgaaaagcgctgattgttacaatgaaatctataacttcaaggcagaagaagtagagttgtatttggaaaaacttaaggaaaaaagaggcttgtctgggaaatatcaaacatcatcaaaattgttccagaactgcagtgaactctttaaaacacagaccttttctggagattttatgcatcgactgcctcttttaggagaaaaacaggaggctaaggagaatggaacaaaccttacctttattggagacaaaaccgcaatgcatgaaccattgcaaacttggcaagatgcaccatacatttttattgtacatattggcatttcatcctcaaaggaatcatcaaaagaaaattcactgagtaatctttttaccatgactgttgaagtgaagggtccctatgaatacctcacacttgaagactatcccttgatgatttttttcatggtgatgtgtattgtatatgtcctgtttggtgttctgtggctggcatggtctgcctgctactggagagatctcctgagaattcagttttggattggtgctgtcatcttcctgggaatgcttgagaaagctgtcttctatgcggaatttcagaatatccgatacaaaggaraatctgtccagggtgctttgatccttgcagarctgctttcagcagtgaaacgctcactggctcgaaccctggtcatcatagtcagtctgggatatggcatcgtcaagccacgcctggagtcactcttcataaggttgtagtagcagragccctctatcttttgttctctggcatggaaggggtcctcagagttactggggcccagactgatcttgcttccttggcctttatccccttggctttcctagacactgccttgtgctggtggatatttattagcctgactcaaacaatgaagctattaaaacttcggaggaacattgtaaaactctctttgtatcggcatttcaccaacacgcttattttggcagtggcagcatccattgtgtttatcatctggacaaccatgaagttcagaatagtgacatgtcagtcggactggcgggagctgtgggtagacgatgccatctggcgcttgctgttctccatgatcctctttgtcatcatggttctctggcgaccatctgcaaacaaccagaggtttgccttttcaccattgtctgaggaagaggaggaggatgaacaaaaggagcctatgctgaaagaaagctttgaaggaatgaaaatgagaagtaccaaacaagaacccaatggaaatagtaaagttaacaaagcacaggaagatgatttgaagtgggtagaagagaatgttccttcttctgtgacagatgtagcacttccagcccttctggattcagatgaggaacgaatgatcacacactttgaaaggtccaaaatggagtaaggaatgggaagatttgcagttaaagatggctaccatcagggaagagatcagcatctgtgtcagtcttctgtacggctccatgggattaaaggaagcaatgacatcctgatctgttccttgatctttgggcattggagttggcgagaggtgtcagaacaaagagaacatcttactgaaaacaagttcataagatgagaaaaatctacgagcttcttatttacaacactgctgccccctttcctcccagactctgacatggatgttcatgcaacttaagtgtgttgttcctgaactttctgtaatgtttcattttttaaatctgacaaactaaaaagtttaacgtcttctaaaagattgtcatcaacaccataatatgtaatctccaggagcaactgcctgtaatttttatttatttagggagttacataggtgatgggggaaattgttaactacctttcattttcctgggaagtcaaggttacatcttgcagaggttgttttgagaaaaaagggcccttctgagttaaggagccatagttctatcaatgatcaaaagaaaaaaaaaaaaactcgatcggcacgagggggggcccggtacccaattcgccctatgggantcgaatgagacc

SEQ ID NO: 111 - DNA, 2249 bp, Homo sapiens
  SITE (1579): n equals a,t,g, or c
  SITE (2226): n equals a,t,g, or c
gaattcggcacgagctcaccgtgctgcgtgacacaaggccagcctgcgcctacgagcccatggactttktratggccctcatctacgacatggtactgswtgtggtcaccctggggctggccctcttcactctgtgcggcaagttcaagaggtggaagctgaacggggccttcctcctcatcacagccttcctctctgtgctcatctgggtggcctggatgaccatgtacctcttcggcaatgtcaagctgcagcagggggatgcctggaacgaccccaccttggccatcacgctggcggccagcgctgggtcttcgtcatcttccacgccatccctgagatccactgcacccttctgccagccctgcaggagaacacgcccaactacttcgacacgtcgcagcccaggatgcgggagacggccttcgaggaggacgtgcagctgccgcgggcctatatggagaacaaggccttctccatggatgaacacaatgcagctctccgaacagcaggatttcccaacggcagcttgggaaaaagacccagtggcagcttggggaaaagacccagcgctccgtttagaagcaacgtgtatcagccaactgagatggccgtcgtgctcaacggtgggaccatcccaactgctccgccaagtcacacaggaagamacctttggtgaaagactttaagttccagagaatcagaatttctcttaccgatttgcctccctggctgtgtctttcttgagggagaaatcggtaacagttgccgaaccaggccgcctcacagccaggaaatttggaaatcctagccaaggggatttcgtgtaaatgtgaacactgacgaactgaaaagctaacaccgactgcccgcccctcccctgccacacacacagacacgtaataccagaccaacctcaatccccgcaaactaaagcaaagctaattgcaaatagtattaggctcactggaaaatgtggctgggaagactgtttcatcctctgggggtagaacagaaccaaattcacagctggtgggccagactggtgttggttggaggtggggggctcccactcttatcacctctccccagcaagtgctggaccccaggtagcctcttggagatgaccgttgcgttgaggacaaatggggactttgccaccggctttgcctggtggtttgcacatttcaggggggtcaggagagttaaggaggttgtgggtgggattccaaggtgaggcccaactgaatcgtggggtgagctttatagccagtagaggtggagggaccctggcatgtgccaaagaagaggccctctgggtgatgaagtgaccatcacatttggaaagtgatcaaccactgttccttctatggggctcttgctctagtgtctatggtgagaacacaggccccgccccttcccttgtagagccatagaaatattctggcttggggcagcagtcccttcttcccttgatcatctcgccctgttcctacacttacgggtgtatctccaaatcctctcccaattttattcccttattcatttcaagagctccaatggggtctccagctgaaansccctccgggaggcaggttggaaggcaggcaccacggcaggttttccgcgatgatgtcacctagcagggcttcaggggttcccactaggatgcagagatgacctctcgctgcctcacaagcagtgacacctcgggtcctttccgttgctatggtgaaaattcctggatggaatggatcacatgagggtttcttgttgcttttggagggtgtgggggatattttgttttggtttttctgcaggttccatgaaaacagcccttttccaagcccattgtttctgtcatggtttccatctgtcctgagcaagtcattcctttgttatttagcatttcgaacatctcggccattcaaagcccccatgttctctgcactgtttggccagcataacctctagcatcgattcaaagcagagttttaacctgacggcatggaatgtataaatgagggtgggtccttctgcagatactctaatcactacattgctttttctataaaactacccataagcctttaacctttaaagaaaaatgaaaaaggttagtgtttgggggccgggggaggactgaccgcttcataagccagtacgtctgagctgagtatgtttcaataaaccttttgatatttctcaaaaaaaaaaaaaaaaaancccgggggggggcccggacctgg

SEQ ID NO: 112 - DNA, 2198 bp, Homo sapiens
  SITE (123): n equals a,t,g, or c
  SITE (621): n equals a,t,g, or c
  SITE (640): n equals a,t,g, or c
gatactataaggcaagtgactcacgggtgcgccgttagactagtggatcccgggtgcaggaattcggcagagcgccgccggagccgaagtgctggcgcccccgcggccgctgcctccgcggancccaaaatcatgaaagtcaccgtgaagaccccgaagaaaaggaggaattcgccgtgcccgagaatagctccgtccagcagtttaaggaagaaatctctaaacgttttaaatcacatactgaccaacttgtgttgatatttgctggaaaaattttgaaagatcaagataccttgagtcagcatggaattcatgatggacttactgttcaccttgtcattaaaacacaaaacaggcctcaggatcattcagctcagcaaacaaatacagctggaagcaatgttactacatcatcaactcctaatagtaactctacatctggttctgctactagcaacccttttggtttaggtggccttgggggacttgcaggtctgagtagcttgggtttgaatactaccaacttctctgaactacagagtcagatgcagcgacaacttttgtctaaccctgaaatgatggtccagatcatggaaaawcccyttgttcagagcatgctcntcaaatcctgacctgatgnagacagttaattatggccaatccacaaatgcagcagttgatacagagaaatcccagaaattagtcatatgttgaataatccagatataatgagacaaacgttggaacttgcccaggaatccagcaatgatgcaggagatgatgaggaaccaggaccgagctttgagcaacctagaaagcatcccagggggatataatgctttaaggcgcatgtacacagatattcaggaaccaatgctgagtgctgcacaagagcagtttggtggtaatccatttgcttccttggtgagcaatacatcctctggtgaaggtagtcaaccttcccgtacagaaaatagagatccactacccaatccatgggctccacagacttcccagagttcatcagcttccagcggcactgccagcactgtgggtggcactactggtagtactgccagtggcacttctgggcagagtactactgcgccaaatttggtgcctggagtaggagctagtatgttcaacacaccaggaatgcagagcttgttgcaacaaataactgaaaacccacaacttatgcaaaacatgttgtctgccccctacatgagaagcatgatgcagtcactaagccagaatcctgaccttgctgcacagatgatgctgaataatcccctatttgctggaaatcctcagcttcaagaacaaatgagacaacagctcccaactttcctccaacaaatgcagaatcctgatacactatcagcaatgtcaaaccctagagcaatgcaggccttgttacagattcagcagggtttacagacattagcaacggaagccccgggcctcatcccagggtttactcctggcttgggggcattaggaagcactggaggctcttcgggaactaatggatctaacgccacacctagtgaaaacacaagtcccacagcaggaaccactgaacctggacatcagcagtttattcagcagatgctgcaggctcttgctggagtaaatcctcagctacagaatccagaagtcagatttcagcaacaactggaacaactcagtgcaatgggatttttgaaccgtgaagcaaacttgcaagctctaatagcaacaggaggtgatatcaatgcagctattgaaaggttactgggctcccagccatcatagcagcatttctgtatctkgaaaaaatgtaatttatttttgataacggctcttaaactttaaaatacctgctttatttcattttgactcttggaattctgtgctgttataaacaaacccaatatgatgcattttaaggtggagtacagtaagatgtgtgggtttttctgtatttttcttttctggaacagtgggaattaaggctactgcatgcatcacttctgcatttattgtaattttttaaaaacatcaccttttatagttgggtgaccagattttgtcctgcatctgtccagtttatttgctttttaaacattagcctatggtagtaatttatgtagaataaaagcattaaaaagaagcaaaaaaaaaaaaaaaaaattcctgcgcccgcgaattcttct

SEQ ID NO: 113 - DNA, 1043 bp, Homo sapiens
ctgaagtgtatgtggtgaggaagaagaggctcctactgtagacagccttgttctacagatcctcccagaaatctctgggccaggtggaacccagggtcagagagggatgggagagaggtttaattttccatgataaataaaaatctataaaataataaacaagagaaaagagattggaaacagccaggttggagcagtgagtgagtaaggaaacctggctgccctctccagattccccaggctctcagagaagatcagcagaaagtctgcaagaccctaagaaccatcagccctcagctgcacctcctcccctccaaggatgacaaaggcgctactcatctatttggtcagcagctttcttgccctaaatcaggccagcctcatcagtcgctgtgacttggcccaggtgctgcagctggargacttggatgggtttgagggttactccctgagtgactggctgtgcctggcttttgtggaaagcaagttcaacatatcaaagatwaatgaaaatgcagatggaagctttgactatggsctcttccagatcaacagccactactggtgcaacrattataagagttactcggaaaacctttgccacgtagactgtcaagatctgctgaatcccaaccttcttgcaggcatccactgcgcaaaaaggattgtgtccggagcacgggggatgaacaactgggttagaatggaagkttgcactgttcaggccggccactcttctactggctgacaggatgccgcctgagatkaaacarggtgcgggtgcaccgtggartcattccaagactcctgtcctcactcarggattcttcatttcttcttcctactgcctccacttcatgttattttcttcccttcccatttacaactaaaactgaccagagccccaggaataaatggttttcttggcttcctccttactcccatctggacccagtcccctggttcctgtctgttatttgtaaactgaggaccacaataaagaaatctttatatttatcgaaaaaaaaaaaaaaaaaactcga

SEQ ID NO: 114 - DNA, 703 bp, Homo sapiens
gaattcggcacgagtgcgcgggcaccacggcggtttttcgacgctggcggtggacgcaggcagcatggaccacggttgctgggcggatggggagcgtctatggtcagttgccttagaagtggtgagatgggaagctgcagttggaagaccctggaggatgcctgacaaggggatgtctgacacatgattggagctctttttgaaatgtttcttgcccttcctggagcagaggagccattatttatgcaggtacatcgaagtcttttgacctccatacagtgattatgcttgtcatcgctggtggtatcctggcggccttgctcctgctgatagttgtcgtgctctgtctttacttcaaaatacacaacgcgctaaaagctgcaaaggaacctgaagctgtggctgtaaaaaatcacaacccagacaaggtgtggtgggccaagaacagccaggccaaaaccattgccacggagtcttgtcctgccctgcagtgctgtgaaggatatagaatgtgtgccagttttgattccctgccaccttgctgttgcgacataaatgagggcctctgagttaggaaaggtgggcacaaaaatcttcatgagcaatacttcttagtagattgttttgttattcaaatcaagttctagtgtttttatgtgagattatataatttacagtgttgttttatatacttttgaataaa

SEQ ID NO: 115 - DNA, 3684 bp, Homo sapiens
  SITE (79): n equals a,t,g, or c
  SITE (2297): n equals a,t,g, or c
  SITE (3679): n equals a,t,g, or c
ggcagagggggcatgagcaggaggaggattaccgctacgaggtgctcacggccgagcagattctacaacacatggtggnaatgtatccgggaggtcaacgaggtcatccagaatccagcaactatcacaagaatactccttagccacttcaattgggataaagagaagctaatggaaaggtactttgatggaaacctggagaagctctttgctgagtgtcatgtaattaatccaagtaaaaagtctcgaacacgccagatgaatacaaggtcatcagcacaggatatgccttgtcagatctgctacttgaactaccctaactcgtatttcactggccttgaatgtggacataagttttgtatgcagtgctggagtgaatatttaactaccaaaataatggaagaaggcatgggtcagactatttcgtgtcctgctcatggttgtgatatcttagtggatgacaacacagttatgcgcctgatcacagattcaaaagttaaattaaagtatcagcatttaataacaaatagctttgtagagtgcaatcgactgttaaagtggtgtcctgccccagattgccaccatgttgttaaagtccaatatcctgatgctaaacctgttcgctgcaaatgtgggcgccaattttgctttaactgtggagaaaattggcatgatcctgttaaatgtaagtggttaaagaaatggattaaaaagtgtgatgatgacagtgaaacctccaattggattgcagccaacacaaaggaatgtcccaaatgccatgtcacaattgagaaggatggtggttgtaatcacatggtctgtcgtaaccagaattgtaaagcagagttttgctgggtgtgtcttggcccatgggaaccacatggatctgcctggtacaactgtaaccgctataatgaggatgatgcaaaggcagcaagagatgcacaggagcgatctagggcagccctgcagaggtacctgttctactgtaatcgctatatgaaccacatgcagagcctgcgctttgagcacaaactatatgctcaggtgaaacagaaaatggaggagatgcagcagcacaacatgtcctggattgaggtgcagttcctgaagaaggcagttgatgtcctctgccagtgtcgtgccacactcatgtacacttatgtcttcgctttctacctcaaaaagaataaccagtccattatctttgagaataaccaagcagatctagagaatgccacagaggtgctctcgggctaccttgaacgagatatttcccaagattctctgcaggatataaagcagaaagtacaagacaagtacagatactgtgagagtcgacgaagggttttgttacagcatgtgcatgaaggctatgaaaaagatctgtgggagtacattgaggactgagaatggccctgcataaaatgaactctgaaaactttaccatctagagtgctcatgcaattaaaacaaaacaaacacaaacaaggaggcactaagcctattctgacaccactggtctgtagtaccagaattgttttgttaatggaaagtttaagtaaattatattgtaataaaaaggtagataaaccattgtacaacagtattctaggccgccaacaaaagtgtgacagacacactaaaagccctccaactttaacttgtaacgtagcttcattctcaaagctgactccttttttttctttttccttttcctgagtgtagtacagttaaaatttcaaacagctccttgacactgcttttcatgttcaaaccagccattttgttgtactttggtaaaggacctcttccccttcctcccctacacatacagatacacccacacacagactgactctctttctctcataccccaaggtcatgagtgaatgatgcttagttccttgtaaagaaaatcttgggatggggaaaggggtaggcagcaagaggattcaacaaacgaaaaacataaaaactttgtatatgacttttaaaacaagaggacaacacagtatttttcaaaattgtatatagcgcatatgcatggacaaagcaagcgtggcacgtgtttgcataatgtttaattacaaaaaaatatttattctttaaaaatcttcaagattatgtctatttgctgtgcattttctttcagtttgcttatctttcccgggttggggttgggataaaggtgtgtcggtttagcacctctggaagacctatctagagctctttcactttcctgaggttattttgcccyttctggtgttggtatgtctgttgccggccatgggctncaygccttgaattcctgctcttgatcagggacaagggaggtcaagctctgactaatgccatgacctgattaaggggtacagcagggagttttgttgctacagctcatgaattaacctgtcccaacctaatccccctccatggcatcatgcctctacccaagcctttgtgtgcccatgttatgcacacagctgtaggcattcttaagtcccctgtcgcatccagtggaagcattttaaaatttcttttactttttggttttcccttaattgctgcttttcagattttagttatggctcgtctgctcaccccttctctacattagggtgtcaaagagaatgttttgctttaaatataaatagccattcatttagtctcagattgtgaatttaaaatggtggataccgaaattgcttgtgtgtgttgctgtgggtttggtttgaaggcaaacacccctagaacatgatattcccatctagtgcatttaaatagaaatcactgagtttgctgcttttttattgtcagcagataggagaattaataatgcattttagctgtgatgtccatttttatgaaattcctactaagagctatgttaaaagtaaaggatggtggtggttgtattaactatatacctgtttaggccattctggctgtggtatttttcaataggtcagcatctgtaaatctgtcagttttatacaggagtgcagagtgaactaggcaactagattaagaggtctaaatatgaaataccagttgaggctgaggacctcttcgtcttcctttaaatgtcttttgcctagggagtgtttaccatttgtgaggcagctttgtctgctcttacactgtacatcctattactccattgggaagtaggttcactttcctctggccttttgcctaagttaggctttgctgaatcaaccctacttttccttttagaaaaggttgttacaggagatttactggcaactgttcttttcccatcaaaaatcagtgaatgtttgctgagtataaatgctgcttccttaaaccacttgtcgctttaggatcaactttacctgtaccttttctcctttcctcccttgccacctcaggtgcaaatctgaactcagtgtctgcttcttccattttctcgtctctctcccctcttcccccattatccatatgacattattttacttcaaatgacagcatcaatcttaaaaagatatacattaaaactaaggagtttttttaaagaaagcctgaataagttcctttccctggtaactttgaaaagcagtcagagttgctatatagatatatgtggctcctttaaaatgctttgtgtatgtgtggtgtttaaaaaaaaaaaaaaaattcgggggggggcccggtncccat

SEQ ID NO: 116 - DNA, 1965 bp, Homo sapiens
  SITE (51): n equals a,t,g, or c
  SITE (476): n equals a,t,g, or c
  SITE (1136): n equals a,t,g, or c
aagaaagggtattaaaattctagatcacatatggacccgggaaggtttttnaccctctgttagtgacatcgagtctcccactagacaaaataggtggaaaaatctctcgagggctcacattgttttgtcatcttcaggaaaaacaccaccaggccataccacagcctgcccagtgaggcggtctttgccaacagcaccgggatgctggtggtggcctttgggctgctggtgctctacatccttctggcttcatcttggaagcgcccagagccggggatcctgaccgacagacagcccctgctgcatgatggggagtgaagcagcaggaaggggctcccaagagctcctggtggtgcagcctgtgctcccctcagaagctctgctcttcccagggctcccggctggtttcagcaggcgactttcttccaatgctgggcccagacttcttgcctgggtgctggcctgccctctccggnccgcttgctgcctgtctgctttccttggtggytttgctgggtgctgggcctgccctctccggccgcttgctgcctgtctgctttccttggtggctttgctgggtgctgggcctgccttctctggctgcttgctgcctgtctgctttccttggtggctttggcttctgcactccttggcgtcasctctcaggtcctccattcacacgaggtcctcctcgctctggccgctcttgctgctcctgtctgaagawatcagactgatttcctcttaagactcctagggatgtggtgaagagctgggactcaagtgcagtccacggtgtgaaacatgagggargtgaggtgtccgtccacttcccccataaaggtgtgcatttcagttaggctgccccgccacagagcaggcttcatctgctctgccatccagccccatctggatgtgaggtggggtggagacatcatggggtgattgcagaaagggggagtggcggcccacgcagcttctgctgaggagctgaccgctctgagctgttctgtttcgtattgctgctctgtgtctgcatgtattgtgaccgtgcggctccacctcttccagctgctgctacagctgaggcctggatcccggcctttccctgtgacttacgtgtctgtcaccggcangcagccctacaaatcctggtgacctgctctcccaagaacagagcctgtccccagatgtcccagtagcgatgagtaacagaggtggctgtggacttcctctacttctccttgctggatcagggccttcctgcctcccgctgggcaggtctggccttgctctcttggcagggccccagcccctctgaccactctgcagctcaccatgcagctgatgccaaagttgtggtgtccagtgtgcagcagccctgggagccactgccaccttcagaggggttccttgctgagacccacattgcttcacctggccccaccatggctgcttgcctggcccaacctagcgttctgtgccatgctagagcttgagctgttgctcttcttcaggggaggaaatagggtggagagcgggaagggtcttgctcctaagtgttgctgctgtggcttttttgccttctccaaagacgcactgccaggtcccaagcttcagactgctgtgcttagtaagcaagtgagaagcctggggtttggagcccacctactctctggcagcatcagcatcctactcctggcaacatcaggccaacgtccaccccagcctcacattgccagatgttggcagaagggctaatattgaccgtcttgactggctggagccttcaaagccactgggatgtcctccaggcacctgggtcccatgaccagctccccgtctccataggggtaggcatttcactggtttatgaagctcgagtttcattaaatatgttaagaatcaaagctgtctttgttcaggctgctataacaaaaatataatagcctgggtggcttaaac

SEQ ID NO: 117 - DNA, 503 bp, Homo sapiens
agtgatccccttgcctcggcctcccaaaatgctggaattgtaagcgtgggcctctgcacccggcctggtccgcaatttaaaaacgcacagccaccattccctytccagaaagcacccagatgcctttgggagaaccagcctcctccatggaggaaagcttgggatctgccttcccacctggggaggagagggatctgtggaaaatccttctgacggacttcccctcagtgcctgatccatactcaatagtagaaaaagtaagaaatatacaaagatagcagatacacggagacagttccccaaatagctgagcgawtagcgcagaagcaatattgaagacctaatagctgagacatttccagaactgataaagtgcatccagccacagatcaagcagcccagaaaattccaggcagcatcaacaaataaatagccccacatgcacccgtgaaaatgcagaagaccaaacaaaaaagtccggtcaacagccagagttaaagagg

SEQ ID NO: 118 - DNA, 1071 bp, Homo sapiens
tcgacccacgcgtccggtcactcccaagatggcggacctactgggctccatcctgagctccatggagaagccacccagcctcggtgaccaggagactcggcgcaaggcccgagaacaggccgcccgcctgaagaaactacaagagcaagagaaacaacagaaagtggagtttcgtaaaaggatggagaaggaggtgtcagatttcattcaagacagtgggcagatcaagaaaaagtttcagccaatgaacaagatcgagaggagcatactacatgatgtggtggaagtggctggcctgacatccttctcctttggggaagatgatgactgtcgctatgtcatgatcttcaaaaaggagtttgcaccctcagatgaagagctagactcttaccgtcgtggagaggaatgggacccccagaaggctgaggagaagcggaagctgaaggagctggcccagaggcaagaggaggaggcagcccagcaggggcctgtggtggtgagccctgccagcgactacaaggacaagtacagccacctcatcggcaagggagcagccaaagacgcagcccacatgctacaggccaataagacctacggctgtgtgcccgtggccaataagagggacacacgctccattgaagaggctatgaatgagatcagagccaagaagcgtctgcggcagagtggggaagagttgccgccaacctcctaggcgccccgcccagctccctttgacccctggggcagggcagggggcagggagagacaaggctgctgctattagagcccatcctggagccccacctctgaaccacctcctaccagctgtccctcaggctgggggaaaacaggtgtttgatttgtcaccgttggagcttggatatgtgcgtggcatgtgtgtgtgtgtgtgagagtgtgaatgcacaggtgggtatttaatctgtattattccccgttcttggaattttcttycccatggggctggggtactttacattcaataaatactgtttaacccaaaaaaaaaaaaaaaaaaraaaraaaaaaaaaaaaaaaaaaaaaaaaaaaagg

SEQ ID NO: 119 - DNA, 1101 bp, Homo sapiens
  SITE (147): n equals a,t,g, or c
  SITE (376): n equals a,t,g, or c
  SITE (395): n equals a,t,g, or c
  SITE (1101): n equals a,t,g, or c
gggcacagctgaagctgcagacctccccaggggatggctcctctcccccaggagccccgaggcaggggaggcagaaagcctgggctctggggggtggcctgcggacagctgtgctgtgggccgggggctgggcctgtcccacagggncgtggagctcgtggttctgagcagccagctgggtggtgtctggggatagctgggaggcacagcggctgccatgtgggactgggactggagtgctccctggtcttggcctctgtggctcagccttgctctggtctgcctgagtgcaggggccaaggggcacagggccagtgaggccggccacgctcgggccctcacctgtgagatggggtcggaatttkacacagcctanggcttggttcttggtkgtngamcgtggactyctkagaacgggagtgctggtcctgaaaggcgtggttggagaccagctgcttttctcgctgtttttctcttaggagattaaacaaaaacagaaagcacaagacgaactcagtagcagaccccagactctccccttgccagacgtggttccagacggggagacgcacctcgtccagaacgggattcagctgctcaacgggcatgcgccgggggccgtcccaaacctcgcagggctccagcaggccaaccggcaccacggactcctgggtggcgccctggcgaacttgtttgtgatagttgggtttgcagcctttgcttacacggtcaagtacgtgctgaggagcatcgcgcaggagtgaggcccaggcgccgagacccaaggcgccactgagggcaccgcgcaccagagcgtgacctcggcaggctggacacactgcccagcacaggcagacccaccaggctcctaggtttagcttttaaaaacctgaaaggggaagcaaaaaccaaaatgtgtgactgggctttggaggagactggagcctcagccctgtcctggccacgggccgctggggctggtgtgggtgggccttgtgtgctggatttgtagcttatcttccgtgttgtctttggacctgttttagtaaacccgtttttcattttaaaaaaaaaaaaaaaaaactttgggggggggccccn

SEQ ID NO: 120 - DNA, 282 bp, Homo sapiens
agcttctctgtccagtcttgaactctgggstctcttggaactttcctcacccctctcagcctgaatattccttccatggattccactcaaccagactttggatctgtgcctacttaatcaaccttatctttgcaatatgttcgggcccaccttccactccttggttcttgttcctccttggcctaacttgtcccttctccacttcacatccccggtgggacagcattcctccttcctcccaacctccctccgtctcaraaaaaaaaaaaaaaaaaaaaaatt

SEQ ID NO: 121 - DNA, 2635 bp, Homo sapiens
  SITE (2605): n equals a,t,g, or c
taagggggtgtgtgctcacctcctcctgacccttaacactcctgtcctgcccagaccaacagagagagctgtccctgagaccccggagagaagcagctgccgaaagctgcagcctttccgcactctgagaccatgatcttcctcctgccaggggagagccacccacaggccatgtccagccccacttccctcagcccccagggyttccttctggcccctctgaggattccctagggctgccccgcagaggggyttccccaagctctgttttgaagcctgcaatgtggaaaagtgagaagtcagagggaacaggacaggtgcagccgggctctgaggccacacctcacacctcgctgttccccaacatcccctgagcagtgtgagctcatctcaccagatgagaagaggccctgtgcatttyttttgtttgtttgttgctgttttcccccacccatccagttctcctcagcaaagcaaattccttaacacctttggtggagaatttcttacccagacttggggctgtgatgcccttcagtgcgtggtgagtgcagcgtgtgtgcgtgtgcctgtgtgtgaacctgggggccatcctggtggcctgggagcgtgaggagaggccccctgtgtgctgggtgagtggtgggtgtggggtcaatgcagtgaggctctctgggtgaggctcccaacctggcagtccccagcctcccagcatctgtgagcgtctgttggactttacagaagagcctcatccygtctgcccctcactctgccctggaatcaacatcttccgagtccttcttgggggaaatagcagagccccacttaactccataaactgcttcccattccgcagcccagttctgattgttgaggtgtcgcgtcgttccaggtcccccagtcccctctttctcctgtcctctctctgtccttcacctccccactccagccccggctcagttcagggaaatgctgttccayatcagccctctgctctctgaggcagccgcgcctctgactcggagctacttgaaacttctgctcttgctaggattggagtctacctatctcttccatttgtcccagctggagttctggaactttcctcctcggggtgggggtgggggttgttaaggatgctggggggcctggggaaggaaggagttcagaggaagggtgtcccctgtcctcttgatgtcaccctccgctcctgggacacgtgctctctctgtctctgggtcttctggctgtgcacgtttgtgtgtccttgtaaatatgttttaggaagaaagcaaaagggactgaactagcctctggtaggattgcaggggtccagccttgcctgtttccgaagcccccacactgcctttcgccccactgagactggtcccctcaaaaggtagacaaaacagcagctccctgtggagctgaagggcggcctcaaagtggctttttgttagacaaggttaaggtttcctcatgagcaaggttgcagatcggtccttcctcagctccttgatttgtgaccttgaccaaggggcctgccacccagcccctccagtgccctctcctcgatgcctcgctccttcctgcccccactcccctggcttaggcaggtaggggaattagggccatgctggaagaagcttaaccatgtgttcaaagaacggtttcttgcttgcttggtcctggaactccccttggctgccccaggcctccttggcccatgggtgctgggggaggtggatgtcagatctggtaggttgcagcagagaaaataaatgtgccttgagagaccactcagagagggtccaagggtgatggagaaggaagcatggcctgggagcttggaagggargggtggtgggtggcggcatcttgactgccccctgttgtcccacacgtggggggtggtcaccccycttcactccagcccgcctgccttcagccttccatgagcttcacctgcttccaacttcactttggagggggtggggtccgttggcatcaacacggggaccctctgcttcaccaaagcccgagccctcagcccctggggagaacaaatggctgagctttgatacctggggtcgtcgagaggctgcgggctggcggcagtcccaggggagagacaccacagaaggagacccagacatcccgaggaagttcccagcagagcaaactgctttccagcctgaagcctgcttaaactgtgtgatgtgcaataactgagcttagagttaggaattgtgttcaagtgcttggatttccgtctgtagatttaactgctgaaattgtatctctcagtaattttagatgtcttttaaaaaattgaaaaacaaagtgttagactgtgtgcgtgtgcgttgatgggcactcaagagtcccgtgagtcatccagccctgcctttcccctgcgcccccatcctctcacgtcccgcccygcctccacttggggaccctgcctcgtgtcgtctttatctgcctattactcagcctaaggaaacaagtacactccacacatgcataaaggaaatcaaatgttatttttaagaaaatggaaaataaaaactttataaacaccaaaaaaaaaaaaaaaaacccngggggggggccggtaacccatttcgcctaa

SEQ ID NO: 122 - DNA, 994 bp, Homo sapiens
gaattcggcagaggttcggcgaagatagggaataaggaagcacaggagtaggggagaaggaagcacaggagtaggggagatatacagcggtcaggataagggggaaagggcggtggttgcscaagaggtgaaacaagatgtgagagacaaggggtagggaagaaatggggcagcggttaggttcagaagcgcatagaccgtggcggacgggcaatgcgaggggcacagaaaggaactgaggggtgggctattttaarggagatggtccttcagccctcttyttttctgcgtagttctcctcctccaggccgcgcgcggatatgtcgtccggaaaccagcccagtctaggctggatgatgacccacctccttctacgctgctcaaagactaccagaatgtccctggaattgagaaggttgatgatgtcgtgaaaagactcttgtctttggaaatggccaacaagaaggagatgctaaaaatcaagcaagaacagtttatgaagaagattgttgcaaacccagaggacaccagatccctggaggctcgaattattgccttgtctgtcaagatccgcagttatgaagaacacttggagaaacatcgaaaggacaaagcccacaaacgctatctgctaatgagcattgaccagaggaaaaagatgctcaaaaacctccgtaacaccaactatgatgtctttgagaagatatgctgggggctgggaattgagtacaccttcccccctctgtattaccgaagagcccaccgccgattcgtgaccaagaaggctctgtgcattcgggttttccaggagactcaaaagctgaagaagcgaagaagagccttaaaggctgcagcagcagcccaaaaacaagcaaagcggaggaacccagacagccctgccaaagccataccaaagacactcaaagacagccaataaattctgttcaatcatttaaaaaaaaaaaaaaaaaaaaaaaaaaaaaaaggggagggg

SEQ ID NO: 123 - DNA, 2537 bp, Homo sapiens
ggcacgagccacctcggccccgggctccgaagcggctcgggggcgccctttcggtcaacatcgtagtccaccccctccccatccccagcccccggggattcaggctcgccagcgcccagccagggagccggccgggaagcgcgatgggggccccagccgcctcgctcctgctcctgctcctgctgttcgcctgctgctgggcgcccggcggggccaacctctcccaggacggctactggcaggagcaggatttggagctgggaactctggctccactcgacgaggccatcagctccacagtctggagcagccctgacatgctggccagtcaagacagccagccctggacatctgatgaaacagtggtggctggtggcaccgtggtgctcaagtgccaagtgaaagatcacgaggactcatccctgcaatggtctaaccctgctcagcagactctctactttggggagaagagagcccttcgagataatcgaattcagctggttacctctacgccccacgagctcagcatcagcatcagcaatgtggccctggcagacgagggcgagtacacctgctcaatcttcactatgcctgtgcgaactgccaagtccctcgtcactgtgctaggaattccacagaagcccatcatcactggttataaatcttcattacgggaaaaagacacagccaccctaaactgtcagtcttctgggagcaagcctgcagcccggctcacctggagaaagggtgaccaagaactccacggagaaccaacccgcatacaggaagatcccaatggtaaaaccttcactgtcagcagctcggtgacattccaggttacccgggaggatgatggggcgagcatcgtgtgctctgtgaaccatgaatctctaaagggagctgacagatccacctctcaacgcattgaagttttatacacaccaactgcgatgattaggccagaccctccccatcctcgtgagggccagaagctgttgctacactgtgagggtcgcggcaatccagtcccccagcagtacctatgggagaaggagggcagtgtgccacccctgaagatgacccaggagagtgccctgatcttccctttcctcaacaagagtgacagtggcacctacggctgcacagccaccagcaacatgggcagctacaaggcctactacaccctcaatgttaatgaccccagtccggtgccctcctcctccagcacctaccacgccatcatcggtgggatcgtggctttcattgtcttcctgctgctcatcatgctcatcttcctcggccactacttgatccggcacaaaggaacctacctgacacatgaggcaaaaggctccgacgatgctccagacgcggacacggccatcatcaatgcagaaggcgggcagtcaggaggggacgacaagaaggaatatttcatctagaggcgcctgcccacttcctgcgccccccaggggccctgtggggactgctggggccgtcaccaacccggacttgtacagagcaaccgcagggccgcccctcccgcttgctccccagcccacccacccccctgtacagaatgtctgctttgggtgcggttttgtactcggtttggaatggggagggaggagggcggggggaggggagggttgccctcagccctttccgtggcttctctgcatttgggttattattatttttgtaacaatcccaaagcaaatctgtctccaggctggagaggcaggagccctggggtgagaaaagcaaaaaacaaacaaaaaacaaaaccctggagtgttaggaggagagtgaaggtagaggggtgaggaagggtaaggggcagggctggtttcagctgggggctctcaccagccctcctttcagcctctacaacagagcagcttcccagacttctccaggaacccagaaacgggatggttgtcggcaaaggttgggagtggcttttcctctggtagccacacacctgagcactacggacagggaggcaggtgccaccttgacacctctcttccatagcaatgggaaagtgatgagtgcgggagtcctgaggagatgtggcctgcagacaacatgcagccatgcagggacccaggactgtaacctggggaggacgcgggtccctgcaaggaagagtagatttggagaggaaggatggaggtggactctcaccccattccccccggaaatgaacaaagccgggccctttccataggaactgcccttggagatagcagagtgtggctgcccctccttgctccagcagcagtgggagaggcactgctctggggcctgaactgcctctgcttccccccctgaggggcccctcactcttacccaagactctggattgttgcacggcaaccactcctcccatggcattgctcagcaactacttctcccttcccggccaccctgtgcccccttcctggtcccaacgccagcccttcatccttcctccctcagcagccaggcagacataacaacaaaactactaaaaggaaaaaaaaaaaaaaaaa

SEQ ID NO: 124 - DNA, 1390 bp, Homo sapiens
  SITE (498): n equals a,t,g, or c
  SITE (499): n equals a,t,g, or c
caagctctaatacgactcactatagggaaagctggtacgcctgcaggtaccggtccggaattcccgggtcgacccacgcgtccgggcctcagggtggacgcatggttctgcactgaggccctcgtcatggtggcgcctgtgtggtacttggtagcggcggctctgctagtcggctttatcctcttcctgactcgcagccggggccgggcggcatcagccggccaagagccactgcacaatgaggagctggcaggagcaggccgggtggcccagcctgggcccctggagcctgaggagccgagagctggaggcaggcctcggcgccggagggacctgggcagccgcctacaggcccagcgtcgagcccagcgggtggcctgggcagaagcagatgagaacgaggaggaagctgtcatcctagcccaggaggaggaaggtgtcgagaagccagcggaaaytcacctgtcggggaaaattggagctaagaaactgcggaanntggaggagaaacaagcgcgaaaggcccagcktgaggcagaggaggctgaacgtgargwgcggaaacgactcgagtcccagcgcgaatgagtggaagaaggaggaggagcggcttcgcctggaggaggagcagaaggaggaggaggagaggaaggcccgcgaggagcaggcccagcgggagcatgaggagtacctgaaactgaaggaggcctttgtggtggaggaggaaggcgtaggagagaccatgactgaggaacagtcccagagcttcctgacagagttcatcaactacatcaagcagtccaaggttgtgctcttggaagacctggcttcccaggtgggcctacgcactcaggacaccataaatcgcatccaggacctgctggctgaggggactataacaggtgtgattgacgaccggggcaagttcatctacataaccccagaggaactggccgccgtggccaacttcatccgacagcggggccgggtgtccatcgccgagcttgcccaagccagcaactccctcatcgcctggggccgggagtcccctgcccaagccccagcctgaccccagtccttccctcttggactcagagttggtgtggcctacctggctatacatcttcatccctccccaccatcctggggaagtgatggtgtggccaggcagttatagattaaaggcctgtgagtactgctgagcttggtgtggcttggtgtggcagaaggcctggcctaggatcctagataagcaggtgaaatttaggcttcagaatatatccgagaggtggggagggtcccttggaagctggtgaagtcctgttcttattatgaatccattcattcaagaaaatagcctgttgcaaaaaaaaaaaaaaaaaaaactcga

SEQ ID NO: 125 - DNA, 1288 bp, Homo sapiens
  SITE (1286): n equals a,t,g, or c
ggcgcgcgggtgaaaggcgcattgatgcagcctgcggcggcctcggagcgcggcggascagacgctgaccacgttcctctcctcggtctcctccgcctccagctccgcgctgcccggcagccgggagccatgcgaccccagggccccgccgcctccccgcagcggctccgcggcctcctgctgctcctgctgctgcagctgcccgcgccgtcgagcgcctctgagatccccaaggggaagcaaaaggcgcatccggcagagggaggtggtggacctgtataatggaatgtgcttacaagggccagcaggagtgcctggtcgagacgggagccctggggccaatggcattccgggtacacctgggatcccaggtcgggatggattcaaaggagaaaagggggaatgtctgagggaaagctttgaggagtcctggacacccaactacaagcagtgttcatggagttcattgaattatggcatagatcttgggaaaattgcggagtgtacatttacaaagatgcgttcaaatagtgctctaagagttttgttcagtggctcacttcggctaaaatgcagaaatgcatgctgtcagcgttggtatttcacattcaatggagctgaatgttcaggacctcttcccattgaagctataatttatttggaccaaggaagccctgaaatgaattcaacaattaatattcatcgcacttcttctgtggaaggactttgtgaaggaattggtgctggattagtggatgttgctatctgggttggcacttgttcagattacccaaaaggagatgcttctactggatggaattcagtttctcgcatcattattgaagaactaccaaaataaatgctttaattttcatttgctacctctttttttattatgccttggaatggttcacttaaatgacattttaaataagtttatgtatacatctgaatgaaaagcaaagctaaatatgtttacagaccaaagtgtgatttcacatgtttttaaatctagcattattcattttgcttcaatcaaaagtggtttcaatattttttttagttggttagaatactttcttcatagtcacattctctcaacctataatttgggaatattgttgtggtcttttgttttttctcttagtatagcatttttaaaaaaatataaaagctaccaatctttgtacaatttgtaaatgttaagaattttttttatatctgttaaataaaaattatttccmacaaccttaaaaaaaaaaaaaaaaaaaaaaaaaaaaaaaaanaa

SEQ ID NO: 126 - DNA, 1517 bp, Homo sapiens
  SITE (159): n equals a,t,g, or c
  SITE (1123): n equals a,t,g, or c
  SITE (1510): n equals a,t,g, or c
agtggcttaaaggcatcgttttagggattactgggaagtatcttcaaagtaatacatgagaaacattccttcctaaatcctttattatattgaatatcgtattaattggttttcagaggttaaattaaccatgtattcctgcaataaatgtcacttgtntcttgtatataatcttttttatatattaccggattgattcattagtattttgttgaggatttttgtgtctatattcataagagatgctggtctgcagttttctttttttgtgataatctggtttttgtatcagtaatacaggccccatgaaacgagttgggaagtgttcacctctcttgtattttttcaagagtttgtgaagaattgctattaattctttaaatgtttggtagaatctaccattgaaatcatgtgtcctgggcttttttttgagggaagtgttctgataactaattcagtatctactttttatagctctgttcagattttgcttcttcctgagttagttttggtaatttgtgtatctctaggartttgtccatttcatttatctcatttgttggcataaattaaactaaatttggcctgagcctacctgtatatcttgagtccctctgtaaggaactgtagcctaacttgtacataaacaaactgaaatcctaaattaggaatgtagtttttgtaacagctcctgagtctcaggcagtcacagcagycaagtctgtcaattgcaggctgctaactaagcagcccatgstcaaatgaggcaaaaacctttgcttttaacacatagtatagctttgtaatccttttcttgcacactcgggtaatttcttcctttttcattccckgwattttccakgaatatgartctyccttttttcccctcctgtcagtctagctaatggtttgtcaattttgttgatcttttgaaraacaaacctttggttccactttcttgttgcatatgctgartattctcataattggagtggaaagctgatctttgattacttattttacttagggctgaggagttcatggacttcgcaaaacctccttgaatctaaattgcatcttctttcctggtttctgggctgaaacatgttttttcccatctwanawacccttggtcttttcatkggcgattaagactagagaaagttctagatmccttgtccttttatgctgtcattttgtttaaaggctttctatgtagtaaaactatctatatagacaaaatagagccttgagttgtggtcttgaatttgatcaacatgatttaccacattctgtactggatatttcttcacctgctgctactgtaaaccattttattcttggatcttctgtagagtatattatcacaggtactttttacaggggtgtctaatcttttggcttccctgggcacattgaaagaagaagaattgtcttgggccacacatcaaatacgctaacactaataatagttgatgagctaaaaaaaaaaaaaaaaaggcaaaaaagncccaaaa

SEQ ID NO: 127 - DNA, 1073 bp, Homo sapiens
  SITE (495): n equals a,t,g, or c
tgaatctattctttgaacattctacaacaagaattacattatactgttataccagagtacttctgcagtgtgaaatagattggtttggaaaatgaacctggctttgctataaattacattcacaggcctttttgcaaatgtgtaacttgcctatcaaagtagtttgtagggcaaatgcagaatatatgtctccatctggtaaagtaccttwtaytcatgtgggaaatcaagtagtatcagaacttggtccaatagtccaatttgttaaagccaagggccattctcttagtgatgggctggaggaagtccaaaaagcagaaatgaaagcttacatggaattagtcaacaatatgctgttgactgcagagctgtatcttcagtggtgtgatgaagctacagtagggrmgatcactcatgmtaggtatggwtctccttacccttggcctctgwwtcatattttggcctatcaaaaacagtgggaagtcaaacgtaagntgaaagctattggatggggaaagaagactctggaccaggtcttagaggatgtagaccagtgctgtcaagctctctctcaaagactgggaacacaaccgtatttcttcaataagcagcctactgaacttgacgcactggtatttggccatctatacaccattcttaccacacaattgacaaatgatgaactttctgagaaggtgaaaaactatagcaacctccttgctttctgtaggagaattgaacagcactattttgaagatcgtggtaaaggcaggctgtcatagagttatgtgttagtctcaggagtcttaacttttgaaatatgttttacttgaatgttacattagatattggtgtcagaattttaaaaccaaattactgctttttgaaacctcaaattatataatgtatcttatgtatgtgctttatattgttatttgtgtatacattaaaataattctgaattatttaatctgatatgttgtattctgtatcttgaaatttttgtttccttgaaacatgcatgcatttaaaaataaagcttaaacaactgtaaaaaaaaaaaaaaaaaactc

SEQ ID NO: 128 - DNA, 300 bp, Homo sapiens
  SITE (273): n equals a,t,g, or c
  SITE (294): n equals a,t,g, or c
caacccctgccttttttttgttttccatttgcttggtagatcttcctccatccctttattttgagcctatgtgtgtctctgcccgtgagatgagtctcctgaatacagcacacttactggtcttgactctgtatccaatttgccagtctgtgtctttcatttggagcatttagcccatttacatttaaggtkaatattgttatgtgtgaatttratcytrtcattatgwtgttagctggttattttgcttgttagttgatgcagtttcttccnggcatcaatggtctttacaanttggca

SEQ ID NO: 129 - DNA, 1275 bp, Homo sapiens
  SITE (1152): n equals a,t,g, or c
ggcagagcctgtccctgctgcccctgcaaaaaaaaccccctctggtgtgagcaggatggttggaggttatgtgagctccttctcctttcctccagtttcctcttcccttctcctccctgcctcttttgcttttccctttcttcctggtaccccctgcccattcctgtattttctcccatcgccattctcccctctcccactgtccctaacccgttcaaactctttcctcttaaatggttgagattttctctcaccaagcacaccccagtattaattaaactagctgcaaacaggcagcaagtggtctaccatgacagatgggttttgtgtgtgtgtgtgtgtgtgtaattgtaataaaacatattgartcactcaataaacacagagtgtctactacatgtatcargcactatcatagatgctaattaacgaaactgaaatggccaggccctcacagtggctcatgcctataatcccagcactttgggaggatgaggcaggaggatcacttgaggccgggagttcaagaccagcctgggcaacatagtaagactccatctctacaaaaaaaaaattttttttattatactttaagttttgggttacatgtgcagaacgtgtagttttgttacataggtatatacgtgccctggtagtttgctgcacccatcaacccatcacctacattaggtatttctcctaatgttacccctctcctagccccccaccccgtgacaggccctggtgtgtgatgttcccctccctgtgtccatgtgttctcattggtcaactctcacctatggagtgagaacatgtggtatttggttttctgatcttgtgatagcttgctgagaatgtkggtttccagctttatccacgtccctgcaaagggcataaactcatccctttttatggctgcatagtgttccatggtgtatacgtgccacattttcttaatctatcattgatggacaagttttgctattgtgaatagtgccacaataaacatacgtgtgcgtgtgtctttatagcagcatgatttataatcctttgggtatatacccagtaatgggatcactgagtcaaatggtatttctcgttctagatccgtaaggaattgccacactgtcttccacaatgtttgaactaatntacactcccaccaacagtgtaaaagtgtttctatttttccacaacctctccaacatctgttatttcctgactttttaatgaacgtcattctaactggcgtgagatggtatctcattgtggttt

SEQ ID NO: 130 - DNA, 472 bp, Homo sapiens
  SITE (2): n equals a,t,g, or c
  SITE (471): n equals a,t,g, or c
  SITE (472): n equals a,t,g, or c
cngaaaccccgtgaaccctccccgggttaaaaagccccccctaaatggggggaacgcytcacacgttataaaaaagcactagaatgttttgaaagcgagaaacaacagctgtgtagggtagctagcagttagtgttgtacagaagacagatatttgtgcatttytgcattttctaagtttgctgcaatgagcatgtattactttcatagttataaaacacatgcaaaatgcccttttaaaatgaaaaaaaatccatgagtgtaagtgatatatatgctttggaaagcctgggacggtcattgtttactctcaatagtatgtgtttgcctttgtctttttgagacattttgttttaatctgttgatgacaataacctgttgataatataacttgataacaaataaaatgacttatgattgaawmaaaaaaaaaaaaaaaaaaaaaaaaaaaaaaaaaaaaaaaaaaaaaaann

SEQ ID NO: 131 - DNA, 1950 bp, Homo sapiens
  SITE (132): n equals a,t,g, or c
  SITE (225): n equals a,t,g, or c
  SITE (249): n equals a,t,g, or c
  SITE (577): n equals a,t,g, or c
  SITE (1933): n equals a,t,g, or c
acctctcagaatcttctctcagcaacctgagtcttcgccgttcctcagagcgcctcagtgacacccctggatccttccagtcaccttccctggaaattctgctgtccagctgctccctgtgccgtgcctgtnattcgctggtgtatgatgaggaaatcatggctggctgggcacctgatgactctaacctcaacacaacctgccccttctgcgcctgcccctttntgcccctgctcagtgtccagaccnttgattcccggcccagtgtccccagccccaaatctgctggtgccagtggcagcaaagatgctcctgtccctggtggtcctggccctgtgctcagtgaccgaagctctgccttgctctggatgagccccagctctgcaacgggcacatggggggagcctcccggcgggttgagagtggggcatgggcatacctgagccccctggtgctgcgtaaggagctggagtcgctggtagagaacgagggcagtgaggtgctggcgttgcctgaactgccctctgcccaccccatcatcttctggaaccttttgtggtatttccaacggctacgnctgcccagtattctaccaggcctggtgctggcctcctgtgatgggccttcgmactcccaggccccatctccttggctaacccctgatccagcctctgttcaggtacggctgctgtgggatgtactgacccctgaccccaatagctgcccacctctctatgtgctctggagggtccacagccagatcccccagcgggtggtatggccaggccctgtacctgcatcccttagtttggcactgttggagtcagtgctgcgccatgttggactcaatgaagtgcacaaggctgtggggctcctgctggaaactctagggcccccacccactggcctgcacctgcagaggggaatctaccgtgagatattattcctgacaatggctgctctgggcaaggaccacgtggacatagtggccttcgataagaagtacaagtctgcctttaacaagctggccagcagcatgggcaaggaggagctgaggcaccggcgggcgcagatgcccactcccaaggccattgactgccgaaaatgttttggagcacctccagaatgctagagaccttaagcttccctctccagcctagggtggggaagtgaggaagaagggattctagagttaaactgcttccctgttgccttcatggagttgggaacaggctgggaaggatgcccagtcaaaggctccaagcgaggacaacaggaagagggatccactgttaccaaaagtcctgattcccccatcaccaacctacccagtttgttcgtgctgatgttgggggagatctggggggagttggtacagctctgttcttcccttgtcctataccgggaactcccctccagggtacccacagatctgcattgccctggtcattttagaagtttttgttttaaaaaacaactggaaagatgcagagctactgagcctttgccctgaatgggaggtagggatgtcattctccaccaataatggtccctcttccctgacgttgctgaaggagcccaaggctctccatgcctttctacctaagtgtttgtattttattttaaattatttattctggagccacagcccccttgcttatgaggttcttatggagagtgagaaagggaagggaaatagggcaccatggtccggtggtttgtagttccttcaaagtcaggcactgggagctagaggagtctcaagctccccttaggaagaactggtgccccctccagtcctaatttttcttgcctgccccgccttggggaatgcctcacccacccaggtcctgacctgtgcaataaggattgttccctgcgaagttttgttggatgtaaatatagtaaaagctgcttctgtctttttcaaaanaaaaaaaaaaaaaaact

SEQ ID NO: 132 - DNA, 990 bp, Homo sapiens
  SITE (657): n equals a,t,g, or c
  SITE (852): n equals a,t,g, or c
  SITE (859): n equals a,t,g, or c
  SITE (962): n equals a,t,g, or c
tggaagatttaaaataggtttcatatttctcttgaatatgaatatataagcttgaataagcttgagtccttattattatgaaattttccttattatttctaccaatgcttcttatattaaagcctgatctttttcatattagtatatgtacattagctgcctgtggattaacatttccatgaaatgtatttttgcattgtttgatcttaaactttttgtgtctttatataaggtatgctycttttaagcatgatatttttaaccacaatagttgaaagacaatctycaccttttacttgtatatttacatgtaatgtaatttttgatgcatattacgtcttattatttaaccaacctattttattttatctagggcatttttcagaaagccttattttcttgtattaatcaaatatttttaycattgtattttccyctattagttagkaatacgktacycyaaatatatattgtggstattttcagaattgcaatatgcctccttaatttattagaggctaacctaaattattacttttaccacttacttgaaaattctggaactttagaacatttattgttttatgcattttaattctacttgtatttttactactcctaaacattattattgttttagacaagccaaaatatatnttgttattatcttatyctccatttctttctgtatttttatgccactatgtatgctcaatttccttctatgtgatgaacctaattcagtacttttgttttttaatctgtgcaggtagcctggccattaaatttttatttttggtttgctgaaaaaattgtgtttatttctatatgcatacttatgcatatagaatnctaggtngacatatttttagtatttataaatgtaaagtcattwattkggcttctatcatttckgtkgagaaatcaattgtcagcccaatagtttttcattttaaattacngaattttttcatgtctctggttttagga

SEQ ID NO: 133 - DNA, 1720 bp, Homo sapiens
gtctgataagcgactgtggttattcccctaaagtttacttcagcactaacactagtgcttccgctggagtttgcagttttccagctttatacaggattttcctttgactggaagagtcaaggatatagagactcaacagtgacatttattgtacaacatcaaggggaataggatactcatcaaactgggattattcttatcaaaacatggtcttctttgaataagaaaaatacatagttggttattatggacttaaaactgtgttaaatggatattctgataaaatatttgctgctctgtagagtgtggaaaatctgagaatattagctttactcatcttgagctttgaggatgttctctgtacgccgatggtttcatattaactaaaaaagctgggtattgtaaaatctcatttataaaaactcagatgagaagaaaattttctttgatggtgagactgttgtcttagttcaggaaattatttaataatcctttgttacctgtgaatgaaggaactttgtaattctgatttatcgtaaaacatgagcctttccagagtcagcttagacactgttgtcgcaaatagccatgctttgccttatgccaaggaggcccagagggagggcctagtcttcctctgttgctgtacatatattgaaatgctttttttttttattttgcatttgttatctataatgagctttctgagccctgatattatgtgagacaaacaggagttattgatgttatacactcccttccattcaggattttctgcttggagggaaatatgttgaccttagagaattgtgaatattgttgcaattcttgaatatattaccatgtgaataatagagactgtgttgctctctagtataagctatatttatttttgattcatttgaattactagttataactggagaaattttgttacctctatcctggcttgcctgactggctgtataatagcagcagcctcttttagagcatcttaatgaaaacatggatgaaaggaattaatgatgatatctgcagactgcgtagaaaatggcttttgttcccagcgttaacattttcttctcaatcacatttcaatgtttgtggagagtggcagattcacaccagaaacactaggtgttcatatccatagcatggatgcagaataagcagttgggagagaagcttcttcctacctggtactcctcccattcacctcagcccagccccagacaggcgttagcattcagtgtgggccctcaggcagccctgaagcctggctgggtcatcagatgggggcagcctgtgacgggcaccagcggcctgattccagggaagagttcctggagggtgttggctgtttttgttagctcagtttttttctgggctccaccattcctaactccaggtagacaagatagatgtcacacacaacaattttaaagtattttgcttagtgcattttgtttatgattgcagtgtttgtttcttatttaataggctttttacttcattctattaaattttagtgtttagaagaggcgggtactgtcactgtgtaaaatatgtaatattttatatgttataccatgtcatatatacttgcaatatcagaccttgcattcaatatacaatgcaattgactctttgcagacctgcatttttcagtgaacaataaaaagattgtctggcactccaaaaaaaaaaaaaaaaaaaaaaa

SEQ ID NO: 134 - DNA, 705 bp, Homo sapiens
  SITE (349): n equals a,t,g, or c
  SITE (409): n equals a,t,g, or c
ggcacgaggccatctgggctcattcagcaggaaataatggaaaaagctgcaatatccaggtgtttactacaatctggaggcaagatctttcctcagtatgtgctgatgtttgggttgcttgtggaatcacagacactcctagaggagaatgctgttcaaggaacagaacgtactcttggattaaatatagcaccttttattaaccagtttcaggtacctatacgtgtatttttggacctatcctcattgccctgtatacctttaagcaagccagtggaactcttaagactagatttaatgactccgtatttgaacacctctaacagagaagtaaaggtatacgtttgtnaaatctgggaagacttgactgctattccattttgggtatcatatgtaccttgatgaagangattaggttgggatacttcaagtgaagcctcccactggaaacaagctgcagttgttttagataatcccatccaggttgaaatgggagaggaacttgtactcagcattcagcatcacaaaagcaatgtcagcatcacagtaaagcaatgaagagcagttttccaatgaaaactgtgtaaatagagcatcaacaagtacaaaattcttgtcttaattagtgggggtatataaaaattccttgtaatggtcaaatattttttaaaattgacattaataaagcatattttaaaagtttct

SEQ ID NO: 135 - DNA, 323 bp, Homo sapiens
agcacacacctcctttagttgctcctaaggtcatgttcaacattcgtggagtgcattttctgctcagggagctttcccagacccggaatgtttggtgctcacagacyctggcaaggatcggtattgctgttcctcagttttgcctggggaaatggaggstcagtgacgttcagtgacgtgcccagagtcatgccattggcgggtggcccagkgmtccaggtctccagcacccctcggccccctcctcaccaggtcacatcatctcctggattagaatctgctcacatagtctgtcctgaaaggaaaaaaaaaaaaaaaaaaac

SEQ ID NO: 136 - DNA, 582 bp, Homo sapiens
ggacggaatggtgcaaccctcctwamttttctkgkgctgttgacaacagagggagggagggaaaacatttttygtgggagaatcctacytctgcagsggagcccttaagcgatkgattttgaatctkgaccctttaccaactaattttgaaggaagataccttggaaatatttggcattcagtgggttactgaaacagcattagtgaattcatctagagaactctttcatttattcaggcaacaactgtacaacttggaaaccttgttacagtccagttgtgattttgggaargtatcaactctacactgcaaagcagacaatattaggcagcagtgtgtactatttctccattatgttaaagttttcatcttcaggtatctgaaagtacagaatgctgagagtcatgttcctgtccatccttatgaggctttggaggctcagcttccctcagtgttgattgatgagcttcatggattactcttgtatattggacacctatctgaacttcccagtgttaatataggagcatttgtaaatcaaaaccagattaaggtttgactggtttcatttgatttttaag

SEQ ID NO: 137 - DNA, 1021 bp, Homo sapiens
  SITE (248): n equals a,t,g, or c
  SITE (1004): n equals a,t,g, or c
  SITE (1014): n equals a,t,g, or c
ttcggcagagcccttgcgcgctcttgaatacctgckttctgtagcgctagttctcttcaagatttgcttagtgtcatttcatttcggtttcttttctcgccatgtttttctgtcggaattacggttcgttttggttctatgtactctctaaaatgttatcgtttttcatttgtctactaattttcgtgcatttgttactactgagtttcttaatatctgactggcctccgcccacgggctctgcagancataaaatactcaggctgatggtagtgcagagactctccctccttgatcagcgcaaacgttggtctgaggcttgagggatggagcaacattttcttggctgtgtgaagcgggcttgggattccgcagaggtggcgccagagccccagcctccacctattgtgagttcagaagatcgtgggccgtggcctcttcctttgtatccagtactaggagagtactcactggacagctgtgatttgggactgctttccagcccttgctggcggctgcccggagtctactggcaaaacggactctctcctggagtccagagcaccttggaaccaagtacagcgaagcccactgagttcagttggccggggacacagaagcagcaagargcacccgtagaakargtggggcaggcagargaacccgacagactcaggctccrgcagcttccctggagcagtcctctccatccytgggacagacagcaggacaccgaggtctgtgacagcgggtgccttttggaacgccgccatcctcctgccctccagccgtggcgccacctcccgggtttctcagactgcctggagtggattcttcgcgttggttttgccgcgttctctgtactctgggcgtgctgttcacggatctgtggagctaagcagccttagatagcagcagaaggctttttggattctcctccttgaaaagattctcagttaccaaacgtctccacctagaaaataaaaatacattaagatgttganaaaaaaaaanaaaaaaa

SEQ ID NO: 138 - DNA, 1777 bp, Homo sapiens
  SITE (58): n equals a,t,g, or c
  SITE (118): n equals a,t,g, or c
  SITE (237): n equals a,t,g, or c
  SITE (661): n equals a,t,g, or c
gattgtttacgatcatatccggcgatttgggtaccgggcccccccccgactttttaanttttttttttgcgagacagggtctcactttgtggctcaggctggagtgtactggcacgtncttagctcactgcagccttgaactcctgggctcaggcaatcctcctaccttagcctcctgagtagctaggactacaggaatgtgccatcatgcctggctaatttttaagttttttgtanagatgggatctcactatgttgcccaagctggtttcagattcctgtgctcaagggattctgctaacttggctccccaaagtgctgggattacaaatgtgagccactgtatctggcccatattcttttttaagaaaaagatgcagaggtgttaaatattaatatcaaattgtccaggcatggtgtttatgaaattgtgtgccctctgacaggcaaccaaacacacacgacttcatttctttattaattcctgcctcatcatcttttctcattgatgctccttaatgtcaaaggaatctctctctctcacacacacataagaccaaaacaaatatcttgaacatgcaaaaaaatagtctacgcttttgaatagtgtgcactgttgaatagtgtgcactgttggatagtgtgcactgttgaagtgtgnatgtgcctaaggcaacaggatcttgggaaagctctagatttttggcytcgaaataaaactgcatgttgaatagcaggtttttacatttattattgttgtgtatttcctcccctttttgcaatactatctacgctgagttatctattgccaactagcaccaattctccaaatcaaagtgtgtgaggaaaacacactcgtgcaatcctctttaacagaagatacaccaagtaacctgtctgtctacttctgttacccagaaataaaagaacttgaagggctgcttggctggaggggtccgggtgggagagcatcctgccctcagtcggaatccatggtgaacagctggatgtcctgtggattccagtacaggccgactgctgagttgtagacaagagaccagacataggggataaaaaactcctcgggctgctcctcttccacatatttgaatttcaattctggaaatttcttcagtctgtctttgggcagcgcaacgacgccttgcttaatgatttccaggacccgttccactgacagctcagctcccagcttgcagcaaccttgagctaaagaaggagatcaccagatcaatattttgcattatatcctgaaatgaaggatgagttcgaaattgttcaaagagatcgcgtttgtaaagcagggcgtataccaagtttgggttgtggtgaagggaatttgtcaggcaggagttgatgatctctaacatcattcgaatcacttcttcaatgacatttaggtcttgtgcataatctggtagaggaacatcattagaactcagcgaacctctcaaggactgtgtggcttgttccagaactttgttgtgttttttagacagcaaagaaaataaactgatgatcctctgggcagcatactgatggagagaacgaaactgtgccgacatatttgctaaagctgccaaacaatttgtgtgaaggtacttgtctcgtgtcctagtcatgttgtattgaatggttcttattaccaccaggatcaggagactccccaaggagatttcagttaaaactcgttctgaataccaagtaatattttttagtatcacttcatgaatggatctgttgaagccatcatcttccg

SEQ ID NO: 139 - DNA, 643 bp, Homo sapiens
tttttttttttttttttttttttttttttttttttttgggaatgagaaaataactttattttcattgtggggagcgggccgatgtccagcctcagaacttctggaactgcttcttggtgccggcagccttggtgaccttgagcacgttgaagcgcactgtcttgctcagaggccggcactcgcccactgtgacgatgtcaccgatctggacgtccctgaagcagggggacaggtgtacagacatgttcttgtggcgcttctcgaagcggttgtacttgcggatgtagtgcagatagtctcggcggatgacaatggtcctctgcatcttcatcttgggtcaccacgccagagaggatccgccctcgaatggacacattaccagtgaaggggcatttcttgtcaatgtaggtgcccctcaatagcctccttggggtgtctttgaagcccagaccgatgttcttgttagtaacccgcgggagcttctccttgccagtttctcccagcaggaccctcttcttgttttgaaagatggtcggctgcttttggtaggcacgctcagtctgaatgtccgccatcttctcgtgccgmaytcctgcagcccgggggatccactagttctagagcggccgcaccgcggtggagc

SEQ ID NO: 140 - DNA, 1220 bp, Homo sapiens
  SITE (404): n equals a,t,g, or c
ttttttttttttgagatggaatcttgctcttgttgtccaggctggagtgcaatggcacgatcctggctcactgcaacctctgcctcctagcttcaagggattctcctgcctcagcctcccgagtagctgggattacacgtgcccaccaccacgcccgactaatattkgtatttttagtagagacggggcttcaccaggttggccaggctagtcttggaactcctgacytcgtgatccacctgcytcggcytcccaaagtgctgggattacaggtgtgagccgtcttgtgttttttgtttttgtttgtttttaaaagatggartttcactcttattgcccsggctggaktgcaatggcacratctcggctcaccgcaatctccacctcctgggctcaagcaattnttctgccccagcctcccaaagtgctggaattacaggtgcccgccaccatgcccaaccaattttcsgtaytcytagtagaggtggggtttcacaacgtkggccaggctggtytcaaactcaaaytcctgacytcaggtgatctgcccactttggcytcccgaaatgctgagactagaggcgcgagccaccacgcctggcctacaaacacattcttgtttgggtttttatataaaatatgagcacaaaaatactttccctaaatacagcctctggctttgcctaacccttggcacacasccaagtacctcttccattctcagatacgtgaggggagtgtatagaggtttagagtacatacgtttcttctccaactcttcgtcgtctagaagaagactaaccacctctttgggtttcaaggtatctggtttgaagttcccacctgaaatcaccatccgctgaatctcactcttctccttggctctttgcagaatgcgttcttcaatggtgcctttacagatgagccggtacacagtaacctgctttgtctgccctaagcggtgggccctgtccatggcctgctggtccacagtggggttccagtcgctatcatagaaaatgcactgtgtctkcagcagtgagattgatacccagtcctccagctcgtgtgcttaacaggaacacaaagatgtcattcctgttctgaaaatcagcaaccatgtctcgcctctccgagatcttggatgagccatcaagcctyatgtaggtatgcttcctgtaaaccatgtattcctccagtaggtctatcatcctcgtgcc

SEQ ID NO: 141 - DNA, 721 bp, Homo sapiens
  SITE (623): n equals a,t,g, or c
  SITE (626): n equals a,t,g, or c
  SITE (638): n equals a,t,g, or c
aattcggcacgagccaggttagccggaagggcagctctccaggccctgcccaccccacagggggctccttatgcacagcggggcgtctccttgtggccatagaaacggaactggctcttttcaacagtgctgcaagaggatggttatttaacgctggcccccaaggaggaaaggcacagacyttcctccctcctggaacatccaagggcactggatcctctgtgtccctctgagatggggtgccactccagcaagagcaccacggtggcagctgagtcccagaagcttgaagaagagygcgagggaagagagccaggtctggagaccggcacccaggcagcagactgcaaggatgccccgctgaaggatggaacccctgagccaaagagctgaaatgcctctctccagagtcggaccctcacctcyttcctggaactgcctttggccccagaaccatgagacaatccccaccctgagaagctccgatcactgggaggagagagaaagcctccagctttgggattcaggcttcagaagtttttagcagcctttgctcattggagaggtggggaaaggataaagttcttataaggaaatccctaatttcccccagctcctccccnccngaagaaggaacnaaagaaagttccttccacacgttttgttggaaacttttcccttgccaactttccttggattgccagaacaaagccctccagaa

SEQ ID NO: 142 - DNA, 1468 bp, Homo sapiens
  SITE (901): n equals a,t,g, or c
atgaattaatgtttataaatgactgtactgaatttaaaaccgtacagtttcatttgcattttgacattactttattatacattttgcatttaaaaggctgcaccagttggcttttcttctgttttattctcaaaatatagagattctgtgatttatttgccctgtttatggattaaaaagaaaattctaatataaagcatttcaataggatgcataggtatattacgttttttaaatgctttagatctgtgattcttgacttactatttattttatcccctttaagtcagggatgctttattctattttaaagcacttatgagttacatgttgtaatcaagtttgcacaatatatttatctatatgaggaacccataaatgaatagctaatttttaaaatgccattaaaatgcatgaaatkcttattaaaaccttactatactatttcttcaaggcaagtaaattgaccatgrgraaagracacagttattaaacactgttgacaggaaaattctccttgataacataggacaattaatggaaaaaaaaattctcattatttgcaaagaatgaacaagttaatgaacaaacaaactagatttggtatgttttcagcttttgtatcatgtttaattgtttaatttggttgaaaaactgcagttgagaaatcagatagcaatatagacattcacagcagctctgtggataccatgtaattgtcaggtaatttcagaatgttgaaaattattcagtgcagccctcatagtatcatacttgaagaaattgattacagttccactaaattgttgaagataaattatttttaaaggttatgaaaactaagttatattaattcatatgtttgatttttaaatcccacctcctcaagctatccaatttnctgactttgaaaataaccatgagagatgccacatttctctctgggaaactaccactcaaagaataattgttaaaaattaagcttttaggtattagaagctgttataaagtataaaattaagatataagcagatcacatgtaaatcattcctaaagcacaagaaaagaatgtgccttgatgtacatatattactaagttgcctctcccagtttactttaaaaatggctttaaggataaagaataaatgtgatagctgtgcatgcattatatatttgcatttgcaaatttcccattgttttaacagctgtgtggctgactttcaattttaagacgtgaattgacatacagcccataactttataatggctgctcatttatcttatctttcagttagtggaaaaacatttcaacctgactaaaatttggaattgtgtcttttatgttccatcctctgttgttactagatttagtttaaaaattgtgtatgaccattaatgtatgtcataaacatgtaaataaaagatgttgaatcttgttgaaaagcawraaaaaaaaaaaaaaactcga

SEQ ID NO: 143 - DNA, 300 bp, Homo sapiens
  SITE (268): n equals a,t,g, or c
  SITE (284): n equals a,t,g, or c
tgaattttttgccaaacttagtaactctgttaaatatttggaggatttaaagaacatcccagtttgaattcatttcaaactttttaaatttttttgtactatgtttggttttattttccttctgttaatcttttgtattcrcttatgctctcgtacattgagtacttttattccaaaactagtgggttttctctactggaaattttcaataaacctgtcattattgcttactttgattaaaaaaaaaaaaaaaaaaaaaaaaaccccnaggggggggccgggtncccaatcccccccaaa

SEQ ID NO: 144 - DNA, 2243 bp, Homo sapiens
  SITE (929): n equals a,t,g, or c
tgcctcccttcctgcagattgtggacagtagttcctcagcctgcaccctggattccttcttccccttcctagctccatgggactcgccccaagactgtggcttcaaggaccaccagccccttactcttcaagccctgactgtggagttggtagatgcctctgatcctcagtattctctctggcaatgttccacggcttctccttcctgggagctggctccataacttgattttccccaaacgtgttgcaatccctgctgccccttagccacccagggtcttgtgtgggtatgagtgtagaggatgggggtatgccaggcctgggccgtcccaggcaggcccgctggaccctgatgctactcctatccactgccatgtacggtgcccatgccccattgctggcactgtgccatgtggacggccgagtgcccttycggccctcctcagccgtgctgctgactgagctgaccaagctactgttatgcgccttctcccttctggtaggctggcaagcatggccccaggggcccccaccctggcgccaggctgctcccttcgcactatcagccctgctctatggcgctaacaacaacctggtgatctatcttcagcgttacatggaccccagcacctaccaggtgctgagtaatctcaagattggaagcacagctgtgctctactgcctctgcctccggcaccgcctctctgtgcgtcaggggttagcgctgctgctgctgatggctgcgggagcctgctatgcagcagggggccttcaagttcccgggaacacccttcccagtccccctccagcagctgctgccagccccatgcccctgcatatcactccgctaggcctgctgctcctcattctgtactgcctcatctcaggcttgtcgtcagtgtacacagagctgctcatgaagcgacagnggctgcccctggcacttcagaacctcttcctctacacttttggtgtgcttctgaatctaggtctgcatgctggcggcggctctggcccaggsctcctggaaggtttctcaggatgggcagcactcgtggtgctgagccaggcactaaatggactgctcatgtctgctgtcatgaagcatggcagcagcatcacacgcctctttgtggtgtcctgctcgctggtggtcaacgccgtgctctcagcagtcctgctacggctgcagctcacagccgccttcttcctggccacattgctcattggcctggccatgcgcctgtactatggcagccgctagtccctgacaacttccaccctgattccggaccctgtagattgggcgccaccaccagatccccctcccaggccttcctccctctcccatcagcagccctgtaacaagtgccttgtgagaaaagctggagaagtgagggcagccaggttattctctggaggttggtggatgaaggggtacccctaggagatgtgaagtgtgggtttggttaaggaaatgcttaccatcccccacccccaaccaagttcttccagactaaagaattaaggtaacatcaatacctaggcctgagaaataaccccatccttgttgggcagctccctgctttgtcctgcatgaacagagttgatgaaagtggggtgtgggcaacaagtggctttccttgcctactttagtcacccagcagagccactggagctggctagtccagcccagccatggtgcatgactcttccataagggatcctcacccttccactttcatgcaagaaggcccagttgccacagattatacaaccattacccaaaccactctgacagtctcctccagttccagcaatgcctagagacatgctccctgccctctccacagtgctgctccccacacctagcctttgttctggaaaccccagagagggctgggcttgactcatctcagggaatgtagcccctgggccctggcttaagccgacactcctgacctctctgttcaccctgagggctgtcttgaagcccgctacccactctgaggctcctaggaggtaccatgcttcccactctggggcctgcccctgcctagcagtctcccagctcccaacagcctggggaagctctgcacagagtgacctgagaccaggtacaggaaacctgtagctcaatcagtgtctctwtaactgcataagcaataagatcttaataaagtcttctaggctgtagggtggttcctacaaccacagccaaaaaaaaaaaaaaaaaactcgag

SEQ ID NO: 145 - DNA, 1082 bp, Homo sapiens
  SITE (265): n equals a,t,g, or c
  SITE (354): n equals a,t,g, or c
  SITE (1064): n equals a,t,g, or c
  SITE (1081): n equals a,t,g, or c
gccaagctctaatacgactcactatagggaaagctggtacgcctgcagktaccggttccgggaattcccgggtcgacccacgcgtccgcttccgtgtgtcaaaatcctcacctccttcataaccatctcccacaattaattcttgactatataaatttatggtttgataatattatcaatttgtaatcaattgagatttctttagtgcttgcttttctgtgactcaactgcccagacacctcattgtacttgaaaactggaacancttgggaatgccatggggtttgataatctgccagggacatgaagaggctcagcttcctgggaccatgactttggctcagctgatcctgnacatgggagaacaaccacatttttctttgtgtgtgcttctagcagctgttcgggaggaccktgacccaayagtgttcccatgctgtttcttgtgaaatgctctcggctatgtagcagcttttgattccctgcataccctaggctgctgcccctatcctgtcccttgtttataacattgagaggttttctagggcacatactgagtgagagcagtgttgagaagtcggggaaaatggtgactacttttagagcaaggctgggcatcagcacctgtccagctctacttgtgtgatgtttcaggaactcagcccctttttctgcctaggataaggagctgaaagattaacttggatctyctaatggtccaaatcttttggtcacaataaagagtctccaaattagagactgcatgttagttctggatggatttggtggcctgacatgataccctgccagctgtgaggggaccccgtttttaagatgcatggccaagctctctgcaaatggaaatgcttacactgggtgttggggatgtttgctacctcctgctatttttgtggttttggttctcccactatggtaggacccctggccagcattgtggcttgtcatgtcagccccattgactaccttctcatgctctgaggtactactgcctctgcagcacaaatttctatttctgtcaataaaaggagatgaaaataaaaaanaaaaaaaaaaaactcgng

SEQ ID NO: 146 - DNA, 4313 bp, Homo sapiens
  SITE (1126): n equals a,t,g, or c
  SITE (4015): n equals a,t,g, or c
caagctggtttgaaactaggggtcgggctcggccgtcgtcgttgtttgtcgccgcatccccgcttccgggttaggccgttcctgcccgccccctcctctcctcccttcggacccatagatctcaggctcggctccccgcccgccgcagcccactgttgacccggcccgtactgcggccccgtggccaccatgtccctgcacggcaaacggaaggagatctacaagtatgaagcgccctggacagtctacgcgatgaactggagtgtgcggcccgataagcgctttcgcttggcgctgggcagcttcgtggaggagtacaacaacaaggttcagcttgttggtttagatgaggagagttcagagtttatttgcagaaacacctttgaccacccataccccaccacaaagctcatgtggatccctgacacaaaaggcgtctatccagacctactggcaacaagcggtgactatctccgtgtgtggagggttggtgaaacagagaccaggctggagtgtttgctaaacaataataagaactctgatttctgtgctcccctgacctcctttgactggaatgaggtggatccttatcttttaggtacctcaagcattgatacgacatgcaccatctgggggctggagacagggcaggtgttagggcgagtgaatctcgtgtctggccacgtgaagacccagctgatcgcccatgacaaagaggtctatgatattgcatttagccgggccgggggtggcagggacatgtttgcctctgtgggtgctgatggctcggtgcggatgtttgacctccgccatctagaacacagcaccatcatttacgaagacccacagcatcacccactgcttcgcctctgctggaacaagcaggaccctaactacctggccaccatggccatggatggaatggaggtggtgattctagatgtccgggttcctgcacacctgtsgccaggttaaacaaccatcgagcatgtgtcaatggcattgcttgggccccacattcatcctgccacatctgcactgcagcggatgaccaccaggctctcatctgggacatccagcaaatgccccgagccattgaggaccctatcctggcctacacagctgnaaggwgagatcaacaatgtgcagtgggcatcaactcagcccgaaytgtcgccatctgctacaacaactgcctggagatactcagagtgtagtgttggtggcgctgtgcccacgaggcaggggcttttgtatttcctgcctctgccccacccccaaagtaagaagaaacatgtttccagtggccagtatgtctttcattgctttgcacccactgttaccagaagctgctctaggagttcctggccagtcaccccatcgccctctgtggcagactcagtgctgtgtggcgcctcctcagcccagggctgagttttaagattttctctcctttcctcttctcctttggttcctcaattaaaaaatgtgtgtatatttgtttgtcaggcgttgtgttgaggagcagttcacgcactggctgtgtctattcctctgcccaggtgtctctgtttgctgcccaakgywkkttttcatgtctcgtccatgtccatgttcgtgttagcactwacgtgggaacaaataccaatttgtcttttctcctagtatcagtgtgtttaacaaattttaactttgtatatttgttatctatcaggctaatttttttatgaaaagaattttactctcctgcttcatttctttgtcttatagtcctccctctttgcaccttcttctcttccctcagtgcctggagctggtactgggcccctggccccatgagcagtttgccttcttgagtcactgcctgtgtagtacatacctgaccgggagtccaaaccaccttggtgctctgaagtccactgactcatcacacctttcttagcctggctcctctcaagggcattctgggcttgtaaacagacataggaagcctctgtttaccctgaagcaccactgtccagcccattggttcccactggcagcatggtagagctgagagaaacaggctctcagggtacctgacttgaggggaatcgtttcatgaagctgaacttcaagcatatttccagtacattctttcagagtctgtttttccatccaaatataagccccaggccattccacttagtgtcttttcaatgataggcaagaatgatatctgagttgaacttcggtgcttctgttgtttgagtttactgtgcctggtggtatattgggcattctttggattgagtgttctgaggtgagagagtcttcccgaggcatcctgtctgtgcttccaaccctgaacaagaccttacatgagagatggactgatggactgcggcaatcctgggctgtcaagtggatagatagttaaaaagcattatactgtgggtaatgaaaagggaggaaaaaaaaagaaggaaaaggaattatagacccccagggtcagccagttaagagctctacccacacctgtcaacccctctctcccccagtttaggttctgagcagtattggacttgtagcctgcagttgtcttttgacttgcaggccgcagtgtctttctgttatgtgaatgagttccatggaggggcatatgtgtgattccaccgttagatgagcccttggggcaggcagtttgggatgtgctcttgggggaaagttggctgtttccttgcgctctgctcctacccgaagtttttaagtccctctgaattgctcatctgagattagtagagtagcaggcctgaaggatgatggttttgtcctctttggttctcacctgcttgagaagtaaaacagtaactttgttcttctgggcccttaagcttttttggttaagtcttccttttcagaagtagatgtcattatatgccaaaagtctagctctttgctttaccatacagggacctgtcccaaagaaaaaggctctttttttagccagcatatttccccttctacccttttactttgttgttctgattttaggactctggctggccatgtgcttgtggttgcctctcctgcatttgccactggatttgcactgcatcgtttggagatacaaagcgagcagttcttggtcagaaccctcctctgcttttcattgtgtttgataatggttactgggtccttctctcaagggtagcaaggccaagctgatggctgcttgtttaggaggccatcagttccttcctgtggagaagggtctgaaatggaagtcagtggtagaaggggctggtctgctgggcagggcttacatccactgagttctaagattcctttcctgatctgcacctacgcctggtctgtatggtggaatttgtcagctggaactcagaaacaacaacttgaaaaaaaaataataattagaacatatttgcataagatagctatttactctggaaaccaacaacttttgagatttcccttgccctgtggacgcccagctcctgtcatccttccttaggtcctgcagtacagtcttcccctgaatgccaccggggacccagggggactccacccccctaagcaagcacacacatactcacagttgatgagttgctggtctttgagtcccagctctcttaccctccctttactccaccagcccgacgacccatgactgaggaggggatttctacagtctcaggatttagaaagtctgtaagccatccatgctccagaaagcaccgatctgttgtagttgcaaaaacaactctgtaatttgttgaggttctcaaactgacagccagcgagactgggtgggaggccctggatctgttctccctgactgcgggaggagcagccactaggactttagcaggaagcccacatggaggctccgccaggctgtggcccagctggtgatggcccttttgctcctggcagcctgaggcacagctgcctgtattgtcctcatctgttctgactgaaggatggaggtgctgaataaattaggcctcaggcntctaccaccagagagctggagaatgggtccacgtcattcaaggacctgaattttttatgctcaggagcattggaatcctcttcttccagggaggaattagcctgcaaggttaggacttgaagagggaaggtatttaataactgggcgaggatgggtgtggtggctcacacctgtaatcccagcattttgggaggctgaggtggccagatcccaaggtcagaagatcgagaccatcctggctaacatggtgaaaccccatctctactaaaaatacaaaattaaattggccgggcgtgaa

SEQ ID NO: 147 - DNA, 1183 bp, Homo sapiens
  SITE (1053): n equals a,t,g, or c
ggcagagcctcaagctgacttggattatgtggtccctcaaatctaccgacacatgcaggaggagttccggggccggttagagaggaccaaatctcagggtcccctgactgtggctgcttatcakwyggggagtgtctactcagctgctatggtcacagccctcaccctgttggccttcccacttctgctgttgcatgcggagcgcatcagccttgtgttcctgcttctgtttctgcagagcttccttctcctacatctgcttgctgctgggatacccgtcaccacccctggtccttttactgtgccatggcaggcagtctcggcttgggccctcatggccacacagaccttctactccacaggccaccagcctgtctttccagccatccattggcatgcagccttcgtgggattcccagagggtcatggctcctgtacttggctgcctgctttgctagtgggagccaacacctttgcctcccacctcctctttgcagtaggttgcccactgctcctgctctggcctttcctgtgtgagagtcaagggctgcggaagagacagcagcccccagggaatgaagctgatgccagagtcagacccgaggaggaagaggagccactgatggagatgcggctccgggatgcgcctcagcacttctatgcagcactgctgcagctgggcctcaagtacctctttatccttggtattcagattctggcctgtgccttggcagcctccatccttcgcaggcatctcatggtctggaaagtgtttgcccctaagttcatatttgaggctgtgggcttcattgtgagcagcgtgggacttctcctgggcatagctttggtgatgagagtggatggtgctgtgagctcctggttcaggcagctatttctggcccagcagaggtagcctagtctgtgattactggcacttggctacagagagtgctggagaacagtgtagcctggcctgtacaggtactggatgatctgcaagacaggctcagccatactcttactatcatgcagccaggggccgctgacatctangacttcattattcwatrattcaggaccacagtggagtatgatccctaactcctgatttggatgcatctgagggacaagggggkcggtstccgaagtggaataaaataggcgggcgtggtgacttgcacct

SEQ ID NO: 148 - DNA, 734 bp, Homo sapiens
gaattcggcagagtgaagcattagaatgattccaacactgctcttctgcaccatgagaccaacccagggcaagatcccatcccatcacatcagcctacctccctcctggctgctggccakgatgtcgccagcattaccttccactgcctttctccctgggaagcagcacagctgagactgggcaccaggccacctctgttgggacccacaggaaagagtgtggcagcaactgcmtggctgacctttctatcttctctaggctcaggtactgctcctccatgcccatggytgggccgtggggagaagaagctctcatacgccttcccactccctctggtttataggacttcactccctagccaacaggagaggaggcctcctggggtttccccrrggcagtaggtcaaacgacctcatcacagtcttccttcctcttcaagcgtttcatgttgaacacagctctctccrctcccttgtgatttctgagggtcaccactgccarcctcaggcaacatagagagcctcctgttctttctatgcttggtctgactgagcctaaagttgagaaaatgggtgccaaggccagtgccagtgtcttggggcccctttggctctccctcactctctgaggctccagctggtcctgggacatgcagccaggactgtgagtctgggcasgtccaaggcctgcaccttcaagaagtggaataaatgtggcctttgcttctatttaa

SEQ ID NO: 149 - DNA, 1405 bp, Homo sapiens
  SITE (604): n equals a,t,g, or c
  SITE (842): n equals a,t,g, or c
  SITE (1079): n equals a,t,g, or c
  SITE (1334): n equals a,t,g, or c
ggcacagtggaccccagactccctctccgcctttctctgcctggggagacccactgtgtgcatggcatcactgactcccatacctctggctatcaaaggtttctgccatggccaccctggaagsaaaccagagggaggtagacagggagatcaggtcccttctactctggttcctgctctgtgaaattgtctcaggctggctgtgtccagarggtccctggttctctcarggatgccaaatctacaagaatctctcctcttccagttcctataacctctccttccttttgtctctttagaccttggagtagtagcagccaggttctttctatctctgggttagtgcattatctctggtggctcccttacccaggactttgggaatggtctttttgtaatacattctcctcaaataattcaattttgagtgttctgtatgtatcctgctgggaggttgttatatacaaatcactgtgcccgtttagcagagaaggagactgaagctcagggaggttaagtgtctttctctaggtcgtattgtggagaaagtggctgactggggacttgaatgaggtccctagtttcatgctcggagggcaaagangaatgtccaattggcctgagataagcctctggtaaaatgtactgtacataataggtaatcaataaatgttggctgatgacaaacatgttttctttgttcattagttatagtgattatgttctaaataactccmacaaggaartcagcacatttggaatatcawtatctttccatgataatatctttccmyggaaagawaatgatattccmaactgggagtgtcccwagcaratctgantctgtgtattggccctggggtgggccagccccttagactctatggtctcattctctttgtttacaaaattgagataaggccttattctctccccaccccacccatccatattgttttgagaataaaatgagaggatgtgtgtcaagggtgtattttggcaatagtctctgagccattttctgagcacctccatactgttgacactcaagtaatatttcatcagcattccattcaggntcctcccttaatgaggtgtgcgatgtacaagagtygtgaggtggcaaaggatgggctcctgaggaaacacttaggaaactgggctttctgccattaaaagagacaaacctttgtggtgacctaattaaagtttttaaaattcaatttggaaagttagcaagctagctcctktccaggwaaaataaggagtcagtgcatgacctaaccggtcccgggctgcttgccattccaaacaactgcagtaagtttatcacnttctttcagggactgaggtttccaggcacagacttggataaggaaggatgtcctatggggtcacattgatg

SEQ ID NO: 150 - DNA, 2890 bp, Homo sapiens
  SITE (45): n equals a,t,g, or c
ttatatgctacagctacagtaatttcttctccaagcacagagganctttcccaggatcagggggatcgcgcgtcacttgatgctgctgacagtggtcgtgggagctggacgtcatgctcaagtggctcccatgataatatacagacgatccagcaccagagaagctgggagactcttccattcgggcatactcactttgattattcaggggatcctgcaggtttatgggcatcaagcagccatatggaccaaattatgttttctgatcatagcacaaagtataacaggcaaaatcaaagtagagagagccttgaacaagcccagtcccgagcaagctgggcgtcttccacaggttactggggagaagactcagaaggtgacacaggcacaataaagcggaggggtggaaaggatgtttccattgaagccgaaagcagtagcctaacgtctgtgactacggaagaaaccaagcctgtccccatgcctgcccacatagctgtggcatcaagtactacaaaggggctcattgcacgaaaggagggcaggtatcgagagcccccgcccacccctcccggctacattggaattcccattactgactttccagaagggcactcccatccagccaggaaaccgccggactacaacgtggcccttcagagatcgcggatggtcgcacgatcctccgacacagctgggccttcatccgtacagcagccacatgggcatcccaccagcagcaggcctgtgaacaaacctcagtggcataaaycgaacgagtctgacccgcgcctcgccccytatcagtcccaagggttttccaccgaggaggatgaagatgaacaagtttctgctgtttgaggcacagacttttctggaagcagagcgagccacctgaaaggagagcacaagaagacgtcctgagcattggagccttggaactcacattctgaggacggtggaccagtttgcctccttccctgccttaaaagcagcatggggsttcttctccccttcttcctttcccctttgcatgtgaaatactgtgaagaaattgccctggcacttttcagactttgttgcttgaaatgcacagtgcagcaatcttcgagctcccactgttgctgcctgccacatcacacagtatcattccaaattccaagatcatcacaacaagatgattcactctggctgcacttctcaatgcctggaaggattttttttaatcttccttttagatttcaatccagtcctagcacttgatctcattgggataatgagaaaagctagccattgaactacttggggcctttaacccaccaaggaagacaaagaaaaacaatgaaatcctttgagtacagtgcttgtccacttgtttacaatgtcctccttttaaaaaaaaaaaaatgagtttaaagattttgttcagagagtaaatatatatccatttaatgattacagtattattttaaaccttaagtagggttgccagcctggtttctgaaaaaccaaatatgccggacagggtgtggccacaccaagaagacgggaagacctggcttgtgaccctggcttcccatgtccttctggtctcacccgcgaagtgccctatcctggaagtatgaaatgttagccaattaataccaagacacctcatctgctccttccccagtggatggggttcttctgtaaaactgtttgcacatggccaggggagggaactaggacccttgtgtcctgtctgagccttatggaggcaggacggtgtcattggcggatgtgtcctgctccattgagatggatggcaaaccccatttttaagttatatttctttgatttttgttaatttagaggtgtaggttttgttttttgtttttttgtttttttttaagagaaacatttataactggatagcattgcagtgaaagcagcttgggatgttggagctaatgccagctgtttatactgctctttcaagacagcctccctttattgaattggcattagggaataaacaagcctttaaacgtgataaaagatcaaaaacctggttagacatgccagcctttgcaaggcaggttagtcaccaaagactaacctccaagtggctttatggacgctgcatatagagaaggcctaagtgtagcaaccatctgctcacagctgctattaaccctataatgactgaaatgacccctccactctatttttgtgttgttttgcacagactccggaaaagtgaaggctgccaatctgagtagtactcaaatgtgaggaactgctggtcttggattttttttccattaaattcagctgatcatattgatcagtagataaacgtaaatagcttcaaattttaaaagtggaattgcagtgttttttcactgtatcaaacaatgtcagtgctttatttaataattctcttctgtatcatggcatttgtctacttgcttattacattgtcaattatgcatttgtaattttacatgtaatatgcattatttgccagttttattatataggctatggacctcatgtgcatatagaaagacagaaatctagctctaccacaagttgcacaaatgttatctaagcattaagtaattgtagaacataggactgctaatctcagttcgctctgtgatgtcaagtgcagaatgtacaattaactggtgatttcctcatacttttgatactacttgtacctgtatgtcttttagaaagacattggtggagtctgtatcccttttgtatttttaatacaataattgtacatattggttatatttttgttgaagatggtagaaatgtactatgtttatgcttctacatccagtttgtacaagctggaaaataaataaatataacataaaaaaaaaaaaaaaaaaaa

SEQ ID NO: 151 - DNA, 2399 bp, Homo sapiens
  SITE (73): n equals a,t,g, or c
  SITE (90): n equals a,t,g, or c
  SITE (128): n equals a,t,g, or c
  SITE (219): n equals a,t,g, or c
  SITE (255): n equals a,t,g, or c
  SITE (272): n equals a,t,g, or c
  SITE (2354): n equals a,t,g, or c
  SITE (2364): n equals a,t,g, or c
gaacttttccatctggcaaaccggaaactccatccccattaaaccaactcccccttttggtttcccccccagnggaatagaatttggacncccatataaatccaggaaaccacctaaattctttagtngtttgtgtttgcaagatctaaggtcatggtaaacattaagttcttaaaatttttgggagggaccagtgcacctctccctctgaattgttcnccaatttaaaattggagtaaggttttaaaatgtctnattccattggaagggtntgttatttcattttgagcccagaggggagaggcacattttaaatatcagaattagattagctttgagtttgtacaattgggaacataatagattttcataaattatgtgtgccttgttggaagtgtcaactgtctttatgtctgcttgtaaaagtttcaaaatatgttttccctcaaaaaggcaacgttacttcatttgcttgaatattatgataggaatgcttactgatattacttgatagtcatatatagcctaggaaatttaacatatatataactatagcagtattaataatgatagttgtacttctttaaaacattaaatttgaggaaactttaatgctgtctcgtgtacattgctttactacagtgagggggaatatcctttagattgagcctcaatttactggttagtagtatgtgaactctggtataaaaacgtaaactagacagtagagccgatgaattaaaattgtaaattgctacattggcattttctacctccttttctgtcagagtattactttttccagcatttattcttatttgtgagtaaagaggaaatgggaacctgaggttaaaattgacatttttgtttcattgagaatttaagcagtaggtacaggagaagtgacttgtcacattaatttggtgcctaaatctgtaactacaagttgtgatcgacatgtacaaaatgtctaagaaaggtcatatgctgaatattttacttttcctgtatagtctgcatgatttgtttcataaacccagcttatttcctccaaaaagcaaaatggtcctgtaatttttaaagtaaaataaacgtgccattttgtctgcaatctataatttcaggaagttattgraagttctgactcagggctttttaacagttcaagcaattgtcagttatattttggaaactccatctgtgtaattctccagtgccttgaaagaattattaacttggcaacactattaaaactttataaaagatggtctttagtgcacgtgtatcattatatacacgttttaaagtcatattgcttagcttgttaataatgattctgcatgtgtgctgggtttgggtaattctttaaaggaagttttctagatttgcacttgatgtttgttttttaaaaactgattatttatggccgtgacactgttaccagaaaagtaattctaattaagttattatgcaaagtcatctataagtagcatctgggaagaggagatsgaggccacagtttgctattttagtatgaaaggaggatctgtttgggaaacatagattgtcttcccctcaaatgaggggaaaaaaaaagaccctttgttcaaatggattctgttgtaaaaaattatttttaaaggaaatcacaaattgtatgtcattcttaatgctagtcttatagaataaatccataaaattgtttttatgttcagtatgtttatgtcattctaaatgcagcaaattcaatgatagcagttcaattgactcatagcagtgttttgtattttttctaattctttagctttcaatattggattaaagtcttgtttgtgaatatagtttccgtatggcaaatgatttcttgcttattagcttttgttaaagaatgcttagtaagagctaagcttttaaaagtaatgcaaacatttatcgttaataaaacctatggtgtaatatcatataatgcttttctttgatctttggagaattattcttttatagtagtatacatgaattttgatttttaaagcatttaaaaacaaatctcaatacattaaaaaacctgttattgttaaaarggaaattaccatgcctttaagaaacaaggatgtacatcttcaattcagcatragtgtccacatctagaaggctctcattgcagttgtttacagttaaggtacctctatctaaagggccaaagaagcatttcataytttaacacctcacattctttcaggattaagacatatgaaaatagtctgaataggataaatttggataggaagtaacttaaccagtctgggaagattcaggctttttctatkaaaaagcttattcctcttcacaactcnggtggtaggntttcatttttcaagagggtagatattttaaagcca

SEQ ID NO: 152 - DNA, 802 bp, Homo sapiens
  SITE (105): n equals a,t,g, or c
  SITE (730): n equals a,t,g, or c
  SITE (755): n equals a,t,g, or c
  SITE (757): n equals a,t,g, or c
  SITE (777): n equals a,t,g, or c
cgtgcctgtagtaagctcatccctgcctttgagatggtgatgcgtgccaaggacaatgtttaccacctggactgctttgcatgtcagctttgtaatcagagattntgtgttggagacaaatttttcctaaagaataacwtgaycctttgccaracggactacgaggaaggtttaatgaaagaaggttatgcaccccmggttcgctgatctatcaacatcaccccattaagaatacaaagcactacattcttttatcttttttgctccacatgtacataagaattgacacaggaacctactgaatagcgtagatataggaaggcaggatggttatatggaataaaaggcggactgcatctgtatgtagtgaaattgccccagttcagagttgaatgtttattattaaagaaaaaagtaatgtacatatggctggatttttttgcttgctattcgtttttgtgtcacttggcatgagatgtttattttggactattgtatataatgtattgtaatatttgaagcacaaatgtaatacagttttattgtgttaccatttgtgttccatttgctyctttgtattgttgcatttagtacaatcagtgtttaaacttactgtatatttatgctttctgtatttaccagctattttaaatgagctgtaactttctagtaaagaattgaaaagcaaatcctcactaaaggatacacaggataggataaagccaagtcncatcaacattaaaaaatactaaaananaaaacacaaaaaaaaaaaancccggggggggcccggaacccattc

SEQ ID NO: 153 - DNA, 461 bp, Homo sapiens
  SITE (77): n equals a,t,g, or c
  SITE (437): n equals a,t,g, or c
ctaggagcaccgagcagcttggctaaaagtaagggtgtcgtgctgatggccctgtgcgcactgacccgcgctctgcnctctctgaacctggcgcccccgaccgtcgccgcccctgccccgagtctgttccccgccgcccagatgatgaacaatggcctcctccaacagccctctgccttgatgttgctcccctgccgcccagttcttacttctgtggcccttaatgccaactttgtgtcctggaagagtcgtaccaagtacaccattacaccagtgaagatgaggaagtctgggggccgagaccacacaggtgggaacaaggacagggggatttaagcagtcaaaaggaaaaacatgttaagaccctagacttgtatattgacacacttgtaccttgtaaggcagaggaatgtaattaaaaagcacttatttggcwnaaaaaaaaaaaaaaaaaaaaaaac

SEQ ID NO: 154 - DNA, 2388 bp, Homo sapiens
gcccacgcgtccgaaagcggagaacgctggtgggcctgttgtggagtacgctttggactgagaagcatcgaggctataggacgcagctgttgccatgacggcccaggggggctggtggctaaccgaggccggcgcttcaagtgggccattgagctaagcgggcctggaggaggcagcaggggtcgaagtgaccggggcagtggccagggagactcgctctacccagtcggttacttggacaagcaagtgcctgataccagcgtgcaagagacagaccggatcctggtggagaagcgctgctgggacatcgccttgggtcccctcaaacagattcccatgaatctcttcatcatgtacatggcaggcaatactatctccatcttccctactatgatggtgtgtatgatggcctggcgacccattcaggcacttatggccatttcagccactttcaagatgttagaaagttcaagccagaagtttcttcagggtttggtctatctcattgggaacctgatgggtttggcattggctgtttacaagtgccagtccatgggactgttacctacacatgcatcggattggttagccttcattgagccccctgagagaatggagttcagtggtggaggactgcttttgtgaacatgagaaagcagcgcctggtccctatgtatttgggtcttatttacatccttctttaagcccagtggctcctcagcatactcttaaactaatcacttatgttaaaaagaaccaaaagactcttttctccatggtggggtgacaggtcctagaaggacaatgtgcatattacgacaaacacaaagaaactataccataacccaaggctgaaaataatgtagaaaactttatttttgtttccagtacagagcaaaacaacaacaaaaaaacataactatgtaaacaagagaataactgctgctaaatcaagaactgttgcagcatctcctttcaataaattaaatggttgagaacaatgcataaaaaaagttgcacaagttccttattttccttaatatttcacttctatttaatacaagctgggacataaaaattctgttggggatacctgggggaagatgtgagaaactaatgctgaattcagcttatacatgatgaaaagaaaaaccagacaaaaggagcacataaatatgcatacagtgtaactgttattattttaatacccacgataagggatttttgttagcatgtttagggggaacgaggattggtgggatccttggggccacaggaatctgaggcaacggaagatatatagagtgatcgtccccctgccgaaggaacctggcayctgtcaagcagatgctgcagttcaaacttcagcttttaagatagatagctattgaaggcagagggtcagcaggaggatgtgtatttctaatctaccctggtaaagtcataggtaagactcaaaagcgggatcttattcaaaaggcaggtatttcctttgttttctgtcttgaaatagccccttcccctaaggtgcattctctcaagttttcagtattgctttatttgcagtgattaaaagagatgagagactttggagacagacaacgtaagcaacacatacacacatgaaatactctagacagagatgaatataaatctggcctaataaccagttttccatgtaacagtgattttgtgtttcgggctgaagcagtggttatattaaaagccactaattcccttatccctttaaaagatttttacaattctccaaccacaaacagcacttctaaaactaactttactttctgcccataatttgttctacatggaaaaaaaaaatattactttggccaggggtgtgtgtaaatgtggcagaattcctaggcaggctgacctttacagtatgggcctttaagatactggatcctggttgggcaacaagtgtcacgcctgaagtttctgaaaacaaattagaagactgttggcttggctaatctcgtagttcagggccaagtttctgtagtcagaatgaagaataaaattgaaagaaaaagggggaaatgcttatacttggcattaagttgaatgcctcaagtcttaactatggctttgtagatgaggcaaaagatttcttagtggtaaaatttcttcaacaggtcaatgccaatctgtatgccattttagtaaagtaggtaaggagagtagccgctcagtaactttggcactaaagaaagagtgtggctctagaacttccaatcccattgctagatgtgccctttaaaagatggtccagtgctttcagggaaggatgtttagccagttttcctagtatttgttccttaagattttttgacctgtgcttaataagacggacgcgtgggtcgaccc

SEQ ID NO: 155 - DNA, 642 bp, Homo sapiens
aaaacagaccatttaaaaactcagacaagattatatttaatatattaattactaaaaaggcacaagattacactgaacatattagctactaaaaaggcactgctaagacattcaagcaaatagctattacacactactgcagattttacaggtttctaattctaacatatgtttgaaaaatccgtgagtattccaaaatatatttaataatggaatatctgcattaatataccatccatgtgtttttaccatttgccttaatattgaatatactgtttacctcacactaaaaagaaaaccagaagccttatttgtgattttgggagtggaagcttccatttttgtgtcaaaaatgaatcctgattcttatggaaatctctgttattaagatatttcaagatgagacaacactgaagatcaaattgtgtttagtatcactatcttctctcctcgtttctctcttactcctcatcctcccagaatctaccagtttatggtagaaagatgggaaccttatttgaatgtgtttttttttttccatgatgtccaattttgttgtgggaaaggatttggataaaatttttgtttaaattttggtagatttttatctatacaaatttaaataaaattatgttttgtaag

SEQ ID NO: 156 - DNA, 1251 bp, Homo sapiens
gccgctgcccctccacggagttgctgatcatctgggctgtgatccacaaacccggttctttgtccctcctaatatcaaacagtggattgccttgctgcagaggggaaactgcacgtttaaagagaaaatatcacgggccgctttccacaatgcagttgctgtagtcatctacaataataaatccaaagaggagccagttaccatgactcatccaggcactgagcatattattgctgtcatgataacagaattgaggggtaaggatattttgagttatctggagaaaaacatctctgtacaaatgacaatagctgttggaactcgaatgccaccgaagaacttcagccgtggctctctagtcttcgtgtcaatatcctttattgttttgatgattatttcttcagcatggctcatattctacttcattcagaagatcaggtacacaaatgcacgcgacaggaaccagcgtcgtctcggagatgcagccaagaaagccatcagtaaattgacaaccaggacagtaaagaagggtgacaaggaaactgacccagactttgatcattgtgcagtctgcatagagagctataagcagaatgatgtcgtccgaattctcccctgcaagcatgttttccacaaatcctgcgtggatccctggcttagtgaacattgtacctgtcctatgtgcaaacttaatatattgaaggccctgggaattgtgccgaatttgccatgtactgataacgtagcattcgatatggaaaggctcaccagaacccaagctgttaaccgaagatcagccctcggcgacctcgccggcgacaactcccttggccttgagccacttcgaacttcggggatctcacctcttcctcaggatggggagctcactccgagaacaggagaaatcaacattgcagtaacaaaagaatggtttattattgccagttttggcctcctcagtgccctcacactctgctacatgatcatcagagccacagctagcttgaatgctaatgaggtagaatggttttgaagaagaaaaaacctgctttctgactgattttgccttgaaggaaaaaagaacctatttttgtgcatcatttaccaatcatgccacacaagcatttatttttagtacattttattttttcataaaattgctaatgccaaagctttgtattaaaagaaataaataataaaataaaaaaaaaaaaaccccggggggggcccggtccccaattggccctatgg

SEQ ID NO: 157 - DNA, 2127 bp, Homo sapiens
  SITE (312): n equals a,t,g, or c
  SITE (1212): n equals a,t,g, or c
ccggcgggagagggaagctgcagcgagaggcgcggatctcagcgcgggagcagtgcttctgcggcaggcccctgagggagggagctgtcagccagggaaaaccgagaacaccatcaccatgacaaccagtcaccagcctcaggacagatacaaagctgtctggcttatcttcttcatgctgggtctgggaacgctgctcccgtggaattttttcatgacggccactcagtatttcacaaaccgcctggacatgtcccagaatgtgtccttggtcactgctgaactgagcaaggacgcccaggcgtcagcgcnccctgcagcacccttgcctgagcggaactctctcagtgccatcttcaacaatgtcatgaccctatgtgccatgctgcccctgctgttattcacctacctcaactccttcctgcatcagaggatcccccagtccgtacggatcctgggcagcctggtggccatcctgctggtgtttctgatcactgccatcctggtgaaggtgcagctggatgctctgcccttctttgtcatcaccatgatcaagatcgtgctcattaattcatttggtgccatcctgcagggcagcctgtttggtctggctggccttctgcctgccagctracacggcccccatcatgagtggccagggcctagcaggcttctttgcctccgtggccatgatctgcgctattgccagtggctcggagctatcagaaagtgccttcggctactttatcacagcctgtgctgtkatcattttgaccatcatctgttacctgggcctgccccgcctggaattctaccgctactaccagcagctcaagcttgaaggacccggggagcaggagaccaagttggacctcattagcaaaggagaggagccaagagcaggcaaagaggaatctggagtttcagtctccaactctcagcccaccaatgaaagccactctatcaaagccatcctgaaaaatatctcagtcctggctttctctgtctgcttcatcttcactatcaccattgggatgtttccagccgtgactgttgaggtcaagtccagcatcgcaggcagcagcacctgggaacgttacttcattcctgtgtcctgtttcttgactttcaatatctttgactggttgggccggagcctcacagctgtattcatgtggcctgggaaggacagccgctggctgccaagctggntgctggcccggctggtgtttgtgccactgctgctgctgtgcaacattaagccccgccgctacctgactgtggtcttcgagcacgatgcctggttcatcttcttcatggctgcctttgccttctccaacggctacctcgccagcctctgcatgtgcttcgggcccaagaaagtgaagccagctgaggcagagaccgcagagccatcatggccttcttcctgtgtctgggtctggcactgggggctgttttctccttcctgttccgggcaattgtgtgacaaaggatggacagaaggactgcctgcctccctccctgtctgcctcctgccccttccttctgccaggggtgatcctgagtggtctggcggttttttcttctaactgacttctgctttccacggcgtgtgctgggcccggatctccaggccctggggagggagcctctggacggacagtggggacattgtgggtttggggctcagagtcgagggacggggtgtagcctcggcatttgcttgagtttctccactcttggctctgactgatccctgcttgtgcaggccagtggaggctcttgggcttggagaacacgtgtgtctctgtgtatgtgtctgtgtgtctgcgtccgtgtctgtcagactgtctgcctgtcctggggtggctaggagctgggtctgaccgttgtatggtttgacctgatatactccattctcccctgcgcctcctcctctgtgttctctccatgtccccctcccaactccccatgcccagttcttacccatcatgcaccctgtacagttgccacgttactgccttttttaaaaatatatttgacagaaaccaggtgccttcagaggctctctgatttaaataaacctttcttgtttttttctccatggaaaaaaaaaaaaaaaaa

SEQ ID NO: 158 - DNA, 1625 bp, Homo sapiens
  SITE (44): n equals a,t,g, or c
  SITE (1066): n equals a,t,g, or c
caaaagatctataatcaggacattgtttatgtaagttggacaanaaaaattcttcccctttatgtccacccttcctatgattgcaagacaaaatttccctcctttacctcatccctataacatgggaggctgagaaaaatgaggggagatggaaccagatacaaggagatccaataagagaagcttatttaaatattgtgaaataaaggaagamccaaagcatttttttaagtggggaatccttttgaacagttattatttatccatattattaayaacatcttttctgacaaaatccatcagatgaagtgtaaatggataatcttttaatggatctaaacctagaaagtttcacttactgttcatgtccgtgttccagaattgtgaaatggtgtgtggttttgctttccaagttcttctctgcctcctcttaattctctaattccatgtcttacagaagaatgagaaatttctttcttacttgagtatcatgctctaaaaaacttggcttcagtcacagaaacgctggctctcctgtgcttatattgaagccaactgcctttaattcttgggccctcttatatttttaaggtgcaaaatttgaagtctcagtcaccagacacaggttctatacaattaatgatgagctggagaagtaatatgtagctaatttttcaaaagcattgaatatactttccggaaagaaaacagaaattaaatattgccacatcttgccagaatcccatctgacaccttaactttgtcaggtttcctacaacttgctaatcaagttttatacattctaaatctccccagtttctttggggctggaagatgcaacttccatttaatagaaactttgaaatcttggggtaagggagcagtggggggactagggagaaggataagaaatagaattattgaaaagcccccaccagggaccttcctggccagaatatgcagagtaattcctgctggcttcacctttgaaagtccctcgaaactatgcagatgaaactgagtctgtttttgatattgtcagatgtattctaccttggaagtcccnacacctaaactggaattcttgtatttacatctcctccactgtcccccacaccacccctcaattcctgctgcccctgctaatgttaagcatttttctcttgttatcatcaggttcacattaaaamcagrtacttacaaactgacttgaagcacagatacttttacgaatgtgataaaatattttcttaagaaaaggaaagaggatgtgggtcaaataaaacaccgcatggatgttgattggtgaatactggtgtaagaaaagggagctcaggaatttttattactgtatttgtaaatgagtttgaaggaatttgtaaatgccactggtacatttttaaggtgacacatttgctccttataaagttattaaaaattacagggtaagcttaaatgacgtttgccagtagttttactttatataatcaatattgatattgttgctgaactatgtaactttatgatgcatttttcagtcccttttcagagcaaatgcttttgcaatggtagtaatgtttagtttaaattgacttaataaattmttacctgagcaaaaaaaaaaa

SEQ ID NO: 159 - DNA, 1687 bp, Homo sapiens
  SITE (334): n equals a,t,g, or c
  SITE (505): n equals a,t,g, or c
  SITE (1044): n equals a,t,g, or c
  SITE (1670): n equals a,t,g, or c
  SITE (1678): n equals a,t,g, or c
  SITE (1683): n equals a,t,g, or c
  SITE (1684): n equals a,t,g, or c
cggggtcaccagttattagaggaagtaacacaaggggatatgagtgcagcagacacatttctgtccgatctgccaagggatgatatctatgtgtcagatgttgaggacgacggtgatgacacatctctggatagtgacctggatccagaggagctggcaggagtcaggggacatcagggtctaagggaccaaaagcgtatgcgacttactgaagtgcaagatgataaagaggaggaggaggaggagaatccactgctggtaccactggaggaaaaggcagtactgcaggaagaacaagccaacctgtggttctcaaagggcagctttgctgggnatcgaggacgatgccgatgaaggccctggagatcagtcaggcccagctgttatttgagaaccggyggaagggacggcagcagcagcagaagcagcagctgccacagacacccccttcctgtttgaagactgagataatgtctcccctgtaccaagatgaagcccctaaggnaacagaggcttcttcggggacagaagctgccactggccttgaaggggaagaaaaggatggcatctcagacagtgatagcagtactagcaktgaggaagaagagagctgggaaccctccgtggtaagaagcgaascgtgggcctaaagtcagatgatgacgggtttgagatagtgcctattgaggacccagcgaaacatcggatactggaccccgaaggccttgctctaggtgctgttattgcctcttccaaaaaggccaagagagacctcatagataactccttcaaccggtacacatttaatgaggatgagggggagcttccggagtggtttgtgcaagaggaaaagcagcaccggatacgacagttgcctgttggtaagaaggaggtggagcattaccggaaacgctggcgggaaatcaatgcacgtcccatcaagaaggtggctgaggctaaggctagaaagaaaaggaggatgctgaagaggctggagcagaccaggaagaaggcagaagccgtggtgaacacagtggacatctncagaacgagagaaagtggcacagctgcgaagtctctacaagaaggctgggcttggcaaggagaaacgccatgtcacctacgttgtagccaaaaaaggtgtgggccgcaaagtgcgccggccagctggagtcagaggtcatttcaaggtggtggactcaaggatgaagaaggaccaaagagcacagcaacgtaaggaacaaaagaaaaaacacaaacggaagtaagcagagctgccaggctcccaggagagcatggggactaggaggaagggtgtggcatggctcagtctggcccccttgattaccggcctagcccctgctcacatcacagctgtctgaagaacagtgaggtggagtgcctagaactcccgtggtggtcctgagcagagaggaggatgtcctcctgcctgcctgaaggtctcccatgaaaacactgctgaactgtgttgacactcatgaccctttttttaaaccgttaaagggaagttcggtgttggagcgatactcaatgtagtcagtctacacctggacgtgtgggccacttaagccctccccacccccatcctattcctraataaaaccaggataatggaaraaaaaaaaaaaaaaaaaaaaagggggggcccntaaagggncccannttt

SEQ ID NO: 160 - DNA, 1842 bp, Homo sapiens
  SITE (19): n equals a,t,g, or c
  SITE (62): n equals a,t,g, or c
  SITE (1793): n equals a,t,g, or c
  SITE (1834): n equals a,t,g, or c
ggatgacagattgcgacanagatttgtgacccttcctgctgaacttcagagggagctgaaancagcgtatgatcaaagacaaaggcagggcgagaacagcactcaccagcagtcagccagcgcatctgtgccccgagaatcctttacttcatctaaaggcagcagtgaaagaaaagaaaagaaacaagaagaaaaaaaccattggttcaccaaaaaggattcagagtcctttgaataacaagctgcttaacagtcctgcaaaaactctgccaggggcctgtggcagtccccagaagttaattgatgggtttctaaaacatgaaggacctcctgcagagaaacccctggaagaactctctgcttctacttcaggtgtgccaggcctttctagtttgcagtctgacccagctggctgtgtgagacctccagcacccaatctagctggagctgttgaattcaatgatgtgaagaccttgctcagagaatggataactacaatttcagatccaatggaagaagacattctccaagttgtgaaatactgtactgatctaatagaagaaaaagatttggaaaaactggatctagttataaaatacatgaaaaggctgatgcagcaatcggtggaatcggtttggaatatggcatttgactttattcttgacaatgtccaggtggttttacaacaaacttatggaagcacattaaaagttacataaatattaccagagagcctgatgctctctgatagctgtgccataagtgcttgtgaggtatttgcaaagtgcatgatagtaatgctcggagtttttataattttaaatttcttttaaagcaagtgttttgtacatttcttttcaaaaagtgccaaatttgtcagtattgcatgtaaataattgtgttaattattttactgtagcatagattctatttacaaaatgtttgtttataaagttttatggatttttacagtgaagtgtttacagttgtttaataaagaactgtatgtatatttggtacrggctccttttkgtgaayccttaaaaactcaactctaggargcaactactgtttattatactaaarggctgaaaamcctccaggccagactgctaagctctgaaatycctgagaggtctcagaccgggattctacttgttccaagaaagggtaaagcttctaaaccatcttattcttgtctccaagcatgaacacaggagcatgtyaagaaaatctttactactttctyccatgcggagaaatctacatattttgaattagaaacaccctcacacccacttgaagatttttttcctgggaacattatgtcccgtagatcagaggtggtgttgtctttttgcttctactggccattgagaaactttgatgataaaaaagaacggtatagatttttcaaacgtatataaaatatttttatgttatatgttatgccataactttaaaataaaaatagtttaaaattctatgctagtggatatttggaactttttcctcaaacaaacaccccacactgacttcagcaaaaccctaaaactagctacagattactactacgaatgaatcatyaagttttgtgtctgcaacaatttagaagcactaagcccaaatatcaggaaatgtgtgtatgatggaattttctaggacaaaacagatcaagattaaaacaggatcaaggattaatggtataaaaatggtctactaaaacaggatcaaggattaaaacaggatcaaggattaatggtataaaaatctctactggttaccgggtggcngggccatacagggtagtggtggatggatagtttagtttggnaagggtaa

SEQ ID NO: 161 - DNA, 770 bp, Homo sapiens
  SITE (744): n equals a,t,g, or c
ggcacgagccctatgctgttcttgtgataatgagtgagtctcacaagatctggtggtgttataggcatctggcatttcccctgctgacgctcattctctatcctgccaccctgggaagaagtgtcttctgtcatgattgtaagtttcctgaggcctccccagctatgtagaactgtgagccaattaaacctcttttctctataaattatccagtcttatatatttcttcatagcagtgtgagaacagataataccgtaaattggtatcacagagagtggggtgttgctataaacacatctgaaaatgttaaagcaaatttggaactgggtaacaggcaaaggctggaacagttkgaagaacagttaagaagaagacaggaaaatatgagaaatcttgaaacttcctagagtcttaaaggtctcagaagacatgaagatgtgggaagctttggaacttcctagagacttgtttgaatggctttgaccaaaatgctgatagtgatatggacaatgaagtccaggctgagcttatccagacagacataagaagctcgctgggaacttgagtaaagatcactcttgctaggcaaagagactggtggccttttttcctctgccctagagatctgtggaaatctgaacctgagagagatgatttagggtatctggcagaagaaatatctaagcggcaaaaccttcmagaggaagcagagcataaacgtttgaaaaatttgcagcctgacnatgggagaccaaagttaaacccaatt

SEQ ID NO: 162 - DNA, 519 bp, Homo sapiens
gaattcggcacgagctgagaggcacaggagcaacagccagtgccccctgcagaggaccactggggtcacagacttcaracctgatgacctgggctcagatcccagctctgcacctaccagccgtgtgacaaggtgtcctctctgagcctcagtcacacactgccttaacggttgggcctcatggagctgtttgtgaaggttaaatgggaagacataaagcacttagcccagagccaaggacatgctgaataggataatggtggcctcctttggcgctgtgctggtgcaggtgtgccgaggaaytgggcaggggtgacagatacctcttctaacctagttcctttccaagaacctaattggtgtctctccctcccccaggcaattggaaggaggaggctgggccccagccccagaatacgggaggtttctcaccgtggtagggaaattgctgggttgggggtgtgggcaaccacagtgatcgtctctctgcaggacggatgaggctttgctgacagaggc

SEQ ID NO: 163 - DNA, 753 bp, Homo sapiens
  SITE (720): n equals a,t,g, or c
  SITE (730): n equals a,t,g, or c
  SITE (736): n equals a,t,g, or c
  SITE (741): n equals a,t,g, or c
ggcacgagcggcacgagcagccagttgctgactggcacatggcctccagcgtcccggctggtgggcacactagagccggagggatcttcttaattggtaaattggatcttgaagcttcactgtttaaatcttttcagtggcttccctttgtacttagaaaaaaatgcaacttcttctgctgggactcatccgctcacagccttcccctccaccctctctctgcctcatgctctgcccctgcctgccatgcctccgatactcaccttttgtaccccagcacccgtgccctctgcccctcgatctttgcctggctggttgctcctcactcagtgttcaggacaaatgctcctggccctaccccatctagccagtctagcccggtcttccctgtcttccctgtttcattcatggctcttattgtttgttwacttgtgtgctgttgacttttaactctctcagtccccactggaatgcaagcgatctcccaagctcctagaattgttcctgcctcttcacaggcccttacgctgtgtgtgctcgtgccgaattcggcacgagggtatgtgcacttgctggtatgtatgtaggtgtttgctaacacatacgtgcacacgcagaatgcttccaggggactgcacagcctctagttcgcagcccccacccctccctttgsccctgcactctcccctctctgagctgcattcgcatgaaagggtgcanggttcctgancccgcnagcgncacctcctggga

SEQ ID NO: 164 - DNA, 1893 bp, Homo sapiens
tcgagtttttttttttttttttttttttktaatttaaacaaataccaaaagctttatttaagcaaaaacacattcaaccacagaacattcagaaagctaacaggatcatttctacattcattctgcaaacagtgtagtaagaaaggtaatttgagaatttccaaagatgttctcgctagccattatttatggtaattacataacattttgatgtcaagttattacagacttaaaagttaatatagcataattttacaatcgtactttcactatgatttttattttaaccctggatattattggtttgaagctaatattatcagtcctattggctgtcactgtcacagatctgaagatatgtttaaattcatcaagctaggaagatatcaaaatattaacaatcttcaagtatagtgagaaaaaaactgatttaagtgttagcatttctaaacttgagactctaacagtaaaaacaaagtaatctgaaacctgtttccatgggtaaaacactctgcctggtattcttgtacacaaaatttactaaatatgtgaatatcataaaatgaaaatatcactcccttcaatttctttggccttcacaaattcaatgtgactatgatccttttcaataatacttycaatgacattgtgcttctttagaaaaatcacttaagttgtagcatacaatagttaacattagttcttttattgctatggtatatgctaatttttttaaaaggggaaaaaaaaacccagagaacttattaaaatgtttgttaaagcaaacatttcagttggtttcctttctttgaagaataatagaaataaatgtcagaggagtattactaaggagccaaaacaaacaaacaaacaaaaaaacaaaaaactcctttattactcccatcctcagaactaactcaagacaagagatctgtattcaaaaagataaaacaatctcatctcagtaactacctcctatgaaacctaagagagaaaacctgtaatagctctcttaaccaacagccccatctgcacatcaccaagcaccagttccctttgggtagcagtaatgcttgtttttcatctttgcatattaaggactgttgttaacagatttatgggtcatttgtagcttactttgcaaatacctttcacttcttatgaaacacaatatgcccccaaacatggaccattattcaagtagacaaaatcactcactgacagcactttaacaacccgcctccactycatcttcccattctctcaccctatgccttccaatgaacctagtctttgctagtgatgagtccatctggggacaaatactgctttaaagatgatgtaattttcaatgccaaccacagtgactttcccataataggtattaataaacacttgttgacatagttataataagctaaaaatagttaacattaattttgctctttatcttttattcttatggcatagaatttattttaaaagactgaaaaactgattccaatgtaataatcacttactgggccacacgctagatgacagacatgcctccctgcctaaaaagggctcaaaggaactctcagttatacatgagtgaattaaaactttaaatgtactacaagaaagaactttttatatgaaggattctttatgtagagtatcttttttgaaaaatcagattttcttatcctatattacactggttttaattgggcatgctcactttagtggtgtgcctcattacaatgtctcttttgtgttaagaattaacttacaaaagcatttaaaaatcactacatcaaatgggatagagagtaagaagacaggagagagaggagaaaccatgttttttcggacgcgtgggtcgacccacgcgtccgcggacgcgtgggc

SEQ ID NO: 165 - DNA, 2153 bp, Homo sapiens
  SITE (101): n equals a,t,g, or c
  SITE (1670): n equals a,t,g, or c
  SITE (2134): n equals a,t,g, or c
  SITE (2135): n equals a,t,g, or c
caggcctcagggcctctggtggctctggcccagacagtatttgcagttcttgtgctatgggtgggagtcttcttcctcaagtttcggcagctgtgctgtgnctggatgggctgctcctcccagggctcaagggctgtggtccgctcagggtctcatttccccaggccaagttcaaggcagcagccctttgtgaggcgctcttggccctgggctggagggagaactttaagcttttttgctcacagggacgtggtatgggccctgggtgcaggtgcccacattctgctaatgagagctttgtctgatcagtcctgggtccatcagtttgtccatgtgtccggctgccagcccgtcccttgggatccttcccctggggtgtagccttgttcattagtatatactcattccttcatgctttcctcagcagaacacttccacttctgaggtgagcttttgccccrtgcccttcctccacaggtgttgcctttttataaagacctgatagcagaataaattggtgtttccctgttgacccagcaccatttctgtgggcctagaatatggccctcaacccttagagtggggcagtgagggcttgaggagtgacccttcctttctcatggttttagtcattttggctgccagcccttaatggcacagatctgctgcttctaacagatggccaggaggtgacaccgatttcagccattgccaaggttagcaccctctcctttgagcctagggccacactgttcattgtcactttaggcaagtgcctgtttggctttaaaggtaagcctgccagctgtgagaagccttggtaactgatggactcatttcctggtccttaaagatgcagcctcttaagggctccttgatggatgccatctctcctagcccccagccctggtgccactggtgggcaggttcccattctttggggctgggagggacagcttgcctgtttctggtcacaaattacagtcttctctcctgtaccattctgtggcttcagcatgggggcagtagcctttcattagtgtagatagtcattccctggtagggtggagggtaagacatagggtctggaactgtttgggaccttttggggatgtcctgtgcctcccagattcctmgattctgggaggagaggctgccgcattctgctgctcctcacagcgagcaaagctgcacccacttacattcagtattttcctggcactacaaagagtgggaaggcctgggatttgctgctgctcccttagagcagggcccctyttttcagcactttggacacctggagacccagccctgttatttaatggtagtgggcaagtgtgtgtgcatactgtctgccactgctttctccctgccccatgccagagagccctgtccctgccaggcccagccttcttagccccaacttgggaacaaagtgcaacatgggatcatgggttggggtgctcaggtgagccctctctatagtgcttccctgggccaagctgacaccagcccctgagggtggggtgggacgggtggtgcttaaaagaggaaggggaccagtgtagcaacttgccagggaccccacccctccctctctgggcctgtgcagtgagcatggggattcccatcaaggggcctggcacctgtgctagttacgtagccgctgntcacgcgctcactcctgaccacatgcacgttccctagatgcagactgctttgaactttaaagctgtacaatttggttatgtttgtgctgacttaaaatatattttaatgaggaaaaaataatggagaaccctgggaaggacctggttcttttgcttctcggggaactgtaagccctcgcgttctgggaatcgctctctgctgctctttcctggaagctaagcctgtctccaccgcccgaggcctgcgccggtgctcccgccgcagttgcgtttgctttggaccttgcgtgcgggggagggggtgctcggtccgagcccgctcctttctgtacacctagcgctgcccgccccgcttgtgtctgaggtcgtgtatgtcaaaaataaagccgctagaaacggaaaaaaaaaaaaaaaaaaaaaaaaaaaaaaaaaactcgagggggggcccgtacccaattaacccnntatgatctataaagcgtc

SEQ ID NO: 166 - DNA, 1251 bp, Homo sapiens
gcccacgcgtccgcccacgcgtccggcggtgcggagtatggggcgctgatggccatggagggctactggcgcttcctggcgctgctggggtcggcactgctcgtcggcttcctgtcggtgatcttcgccctcgtctgggtcctccactaccgagaggggcttggctgggatgggagcgcactagagtttaactggcacccagtgctcatggtcaccggcttcgtcttcatccagggcatcgccatcatcgtctacagactgccgtggacctggaaatgcagcaagctcctgatgaaatccatccatgcagggttaaatgcagttgctgccattcttgcaattatctctgtggtggccgtgtttgagaaccacaatgttaacaatatagccaatatgtacagtctgcacagctgggttggactgatagctgtcatatgctatttgttacagcttctttcaggtttttcagtctttctgcttccatgggctccgctttctctccgagcatttctcatgcccatacatgtttattctggaattgtcatctttggaacagtgattgcaacagcacttatgggattgacagagaaactgattttttccctgagagatcctgcatacagtacattcccgccagaaggtgttttcgtaaatacgcttggccttctgatcctggtgttcggggccctcattttttggatagtcaccagaccgcaatggaaacgtcctaaggagccaaattctaccattcttcatccaaatggaggcactgaacagggagcaagaggttccatgccagcctactctggcaacaacatggacaaatcagattcagagttaaacagtgaagtagcagcaaggaaaagaaacttagctctggatgaggctgggcagagatctaccatgtaaaatgttgtagagatagagccatataacgtcacgtttcaaaactagctctacagttttgcttctcctattagccatatgataattgggctatgtagtatcaatatttactttaatcacaaaggatggtttcttgaaataatttgtattgattgaggcctatgaactgacctgaattggaaaggatgtgattaatataaataatagcagatataaattgtggttatgttacctttatcttgttgaggaccacaacattagcacggtgccttgtgcakaatagatactcaatatgtgaatatgtgtctactagtagttaattggataaactggcagcatccctga

SEQ ID NO: 167 - DNA, 882 bp, Homo sapiens
  SITE (522): n equals a,t,g, or c
  SITE (752): n equals a,t,g, or c
gacsmtctagaactatggtcccccgggactgcaggaattcggcacagcggctgcgggcgcgaggtgaggggcgcgaggttcccagcaggatgccccggctctgcaggaagctgaagtgagaggcccggagagggcccagcccgcccggggcaggatgaccaaggcccggctgttccggctgtggctggtgctggggtcggtgttcatgatcctgctgatcatcgtgtactgggacagcgcaggcgccgcgcacttctacttgcacacgtccttctctaggccgcacacggggccgccgctgcccacgcccgggccggacagggacagggagctcacggccgaytccgatgtcgacgaktttctggacaaktttctcagtgctggcgtgaagcagagtgacyttcccagaaaggagacggagcagccgcctgcgccggggagcatggaggagagcgtgagargctacgactggtccccgcgcgamgcccggcgcacccagaccagggccggcagcargcggancggaggarcgtgctgcggggcttctgcgccaaytccagcctggccttccccaccaaggagcgcgcattcracgacatccccaactcggagctgagccacctgatcgtggacgaccggcacggggccatctactgctacgtgcccaaggtggcctgcaccaactggaagcgcgtratgatcgtgctgagcggaagctgtgcaccgcgtgcgcctaccgcgacccgytgcgntcccgcgcgagcacgtgcacaacgccagcgcgcactgacttcaacaattctggcgccgctacgggaagtctcccccacctcatgaagtcaagctcaagaatacaccaattctttctgcgcgacccttctg

SEQ ID NO: 168 - DNA, 1208 bp, Homo sapiens
  SITE (161): n equals a,t,g, or c
ttcagaggaaaaataagttctgtatatgttttagctaaatagtattatttttgtcatattcccaaattggaagtcccagtacatattagcctattacaattctaagttatttgcagtaaagaatatagatgaagctggtctcatttctattttccaagtknytgggggccatagtgatttttttttaacctgacaacacctcagggaaatttatggtttacagagcacaacattgtaaattatggcaaagtaaaaaagaaaacactgaatttcaacttggaaaatcagaatgctgttgctaatagtattagtagcaaatatattaagtatgtcaaatatgtcaaatgctgttgtaagtgatttacatatattagtacatttaatctcacataaagcaaattaagtaatatcattagctccattctacagatataaagaccgagactcaggtraattaaggtactcacccaaatttacatagcagaactgaaattcaaacttatgcaattagtctccagtctaagattttaactgcactgttattctgtcgctgttacctactaattgggtwacctgtggcaagctattttaccyctctaagtcaagctgtttattgatcagacagattaakgttwtctgawgtggskgtcmtaaggratcagtatttaacagagtcaaatgcagtgcctgaaatatgcagttggtactcataatamttatttattaaatgagaytcaagaactctagatttggttatcytcctagctgtgwamacacagctatttgttacctatcgttattagaggaacaggcataaagctgtgctgagytgcttgacggaaaattcccactctagaacttcaactggatctttagaactaatcattaatcttggatttacccaggttgattgcccattgcaactcataccacaggcatttcacgtactgtatgcattcctcaaaccagggcagggggatcaggaaatgatttaaacccgtcaactgaggagccccaggaggaccatgcactggctgccctgacattttaccaaatgtggctgtcctgtcatgatcttttcttaagaatccctacgtaattccaaagctaatattwaaatatacgtaaatacctctatcttcactctgtatcccttyacttctaggctctggctccatcaaccattccatcatccttttgagtttccc

SEQ ID NO: 169 - DNA, 1258 bp, Homo sapiens
ggcacgagagaaaagaggttgagaatgttttctagcaggcagaatgtgcatacatgttttcatgagtgtcctttgggtgctgtttcttttaaatcctctgtgcacagggctctggcctttagtaaactgtttttctgtcttacgtcatgctgactgggtgctaggggctgattacaaaggggaagagttgaacagacatcaggggccgatgaaaccaaaggactaggagtcaggagaacaagtcagggattaggagacagcggtttggtttattgttatccagctggaggactcctaggggcagcagcaggaggaataccagggccacggaggggccaggagtctcacagtggagggcagactctaacagatgccagctgaacgctcgctggccctggatgtcatacgagttggggaccagaaatctgggctcagagaacccgtccagggagatttgaagccatgggttatcttctagagttgatactgataatatattttaatttttattgatgtttaataccttctgaaacaggagggtaagatcagatgggaagcccctctgttgaaggatcttgggaacttggtggttttttttttttggtttttttttttttgatcgagctgtggacatccttcttaattcgattctgaggatttgtttaactaaaaagttcccaaacacagaaagggcctccccacctgctttggggagctgtctgtgctgggagtgccaggcatcccatgggacccatcactgccagtgtctgtgcctcccagaggtcagccctgtgtctgccctggctctgtctcctctgtgacagggcagagcatttctggtcagtttctccatggtgcctcccaccctttgtaaagtggatggacatgatggaattcagttgtctcaccctgatagcctgggtgttgatattcactttacccgcactcagacacaggcgaccttgaagcagttctcggtgtgtagagtccacgtgacagtccccacagcctccccagatagctgtgtgcctgtgcgctactgctgtgccattttcccaacttggcgtttcactaaatgcagctgatctctctctctgtgcactcgtgatccatgttgaacaatacatgtaggttctttttccacgcaatgtaagaacatgatatactgtacgttggaaagcatttaccttatttatatacctgaatgttcctactacacaaataaacatatattaaattctaaaaaaaaaaaaaaaaa

SEQ ID NO: 170 - DNA, 1624 bp, Homo sapiens
ggcacgaggtcgccgccgcggccgcctggaattgtgggagttgtgtctgccactcggctgccggaggcgaaggtccctgactatggctccccagagcctgccttcatctaggatggctcctctgggcatgctgcttgggctgctgatggccgcctgcttcaccttctgcctcagtcatcagaacctgaaggagtttgccctgaccaacccagagaagagcagcaccaaagaaacrgagagaaaagaaaccaaagccgaggaggagctggatgccgaagtcctggaggtgttccacccgacgcatgagtggcaggcccttcagccagggcaggctgtccctgcaggatcccacgtacggctgaatcttcagactggggaaagagaggcaaaactccaatatgaggacaagttccgaaataatttgaaaggcaaaaggctggatatcaacaccaacacctacacatctcaggatctcaagagtgcactggcaaaattcaaggagggggcagagatggagagttcaaaggaagacaaggcaaggcaggctgaggtaaagcggctcttccgccccattgaggaactgaagaaagactttgatgagctgaatgttgtcattgagactgacatgcagatcatggtacggctgatcaacaagttcaatagttccagctccagtttggaagagaagattgctgcgctctttgatcttgaatattatgtccatcagatggacaatgcgcaggacctgctttcctttggtggtcttcaagtggtgatcaatgggctgaacagcacagagcccctcgtgaaggagtatgctgcgtttgtgctgggcgctgccttttccagcaaccccaaggtccaggtggaggccatcgaagggggagccctgcagaagctgctggtcatcctggccacggagcagccgctcactgcaaagaagaaggtcctgtttgcactgtgctccctgctgcgccacttcccctatgcccagcggcagttcctgaagctcggggggctgcaggtcctgaggaccctggtgcaggagaagggcacggaggtgctcgccgtgcgcgtggtcacactgctctacgacctggtcacggagaagatgttcgccgaggaggaggctgagctgacccaggagatgtccccagagaagctgcagcagtatcgccaggtacacctcctgccaggcctgtgggaacagggctggtgcgagatcacggcccacctcctggcgctgcccgagcatgatgcccgtgagaaggtgctgcagacactgggcgtcctcctgaccacctgccgggaccgctaccgtcaggacccccagctcggcaggacactggccagcctgcaggctgagtaccaggtgctggccagcctggagctgcaggatggtgaggacgagggctacttccaggagctgctgggctctgtcaacagcttgctgaaggagctgagatgaggccccacaccaggactggactgggatgccgctagtgaggctgaggggtgccagcgtgggtgggcttctcaggcaggaggacatcttggcagtgctggcttggccattaaatggaaacctgaaggccaaaaaaaaaaaaaaaaaaaaaaaaaaaaa

SEQ ID NO: 171 - DNA, 2003 bp, Homo sapiens
  SITE (1961): n equals a,t,g, or c
  SITE (1999): n equals a,t,g, or c
ggcacgagccagcttgcaggaggaatcggtgaggtcctgtcctgaggctgctgtccggggccggtggctgccctcaaggtcccttccctagctgctgcggttgccattgcttcttgcctgttctggcatcaggcacctggattgagttgcacagctttgctttatccgggcttgtgtgcagggcccggctgggctccccatctgcacatcctgaggacagaaaaagctgggtcttgctgtgccctcccaggcttagtgttccctccctcaaagactgacagccatcgttctgcacggggctttctgcatgtgacgccagctaagcatagtaagaagtccagcctaggaagggaaggattttggaggtaggtggctttggtgacacactcacttctttctcagcctccaggacactatggcctgttttaagagacatcttatttttctaaaggtgaattctcagatgataggtgaacctgagttgcagatataccaacttctgcttgtatttcttaaatgacaaagattacctagctaagaaacttcctagggaactagggaacctatgtgttccctcagtgtggtttcctgaagccagtgatatgggggttaggataggaagaactttctcggtaatgataaggagaatctcttgtttcctcccacctgtgttgtaaagataaactgacgatatacaggcacattatgtaaacatacacacgcaatgaaaccgaagcttggcggcctgggcgtggtcttgcaaaatgcttccaaagccaccttagcctgttctattcagcggcaaccccaaagcacctgttaagactcctgacccccaagtggcatgcagcccccatgcccaccgggacctggtcagcacagatcttgatgacttccctttctagggcagactgggagggtatccaggaatcggcccctgccccacgggcgttttcatgctgtacagtgacctaaagttggtaagatgtcataatggaccagtccatgtgatttcagtatatacaactccaccagacccctccaacccatataacaccccacccctgttcgcttcctgtatggtgatatcatatgtaacatttactcctgtttctgctgattgtttttttaatgttttggtttgtttttgacatcagctgtaatcattcctgtgctgtgttttttattacccttggtaggtattagacttgcacttttttaaaaaaaggtttctgcatcgtggaagcatttgacccagagtggaacgcgtggcctatgcaggtggattccttcaggtctttcctttggttctttgagcatctttgctttcattcgtctcccgtctttggttctccagttcaaattattgcaaagtaaaggatctttgagtaggttcggtctgaaaggtgtggcctttatatttgatccacacacgttggtcttttaaccgtgctgagcagaaaacaaaacaggttaagaagagccgggtggcagctgacagaggaagccgctcaaataccttcacaataaatagtggcaatatatatatagtttaagaaggctctccatttggcatcgtttaatttatatgttatgttctaagcacagctctcttctcctattttcatcctgcaagcaactcaaaatatttaaaataaagtttacattgtagttattttcaaatctttgcttgataagtattaagaaatattggacttgctgccgtaatttaaagctctgttgattttgtttccgtttggatttttgggggaggggagcactgtgtttatgctggaatatgaagtctgagaccttccggtgctgggaacacacaagagttgttgaaagttgacaagcagactgcgcatgtctctgatgctttgtatcattcttgagcaatcgctcggtccgtggacaataaacagtattatcaaagagaaaaaaaaaaaaaaaaaactcgngggggggcccggtacccaattcgccctatagtgagccnattc

SEQ ID NO: 172 - DNA, 786 bp, Homo sapiens
ggcacagcggcacgagaagactttggtgtttaagagattaatgtgttagccagaacaactcatttctctaccmgtgtgtagtccatttatctttaaagattttctattggaataattttgaaattactttcttagttttcttcattaaaaactaagaaaatgctttgtttattatgaattgctatttctcttgattattattcttggagaaagtctatcagacgtaattcttctgatttgcttctaggctagaggaaaatgtgaaagatgacaaatgaaaatttcaaaggttgtcagtagtatgacttcttttatcgtttgtcattatcacaaatatatcaacataggacttttaaaagatattttgtacatattgggccttagtaggattttgcatgaattttttttttcttttatgcccagagagaaagagcaaagaaataaccaagggtgatgtactcgtattgaaggtttaccaaataaggactgcttttattatgaactatagtctatattctaagtaaatcaatttttctattatgtgttttttgttcctgcaggcaagatctctgaactttatgcagagggttcttttaaaaaaacaaagttgaatttttttatttcttggaatattttttttcattgatttctcccaagtagagcagattcaaatctcctttgtaccctatgtcttttttgttttgctattagctcagtattccgtttctacattttcctttcctagaaccagtcaataaatgacaaaaaaaaaaaaaaaaaactcga

SEQ ID NO: 173 - DNA, 1758 bp, Homo sapiens
gggacgagccctgcccacctcctgcagcctcctgcgccccgccgagctggcggatggagctgcgcacggggagcgtgggcagccaggcggtggcgcggaggatggatggggacagccgagatggcggcggcggcaaggacgccaccgggtcggaggactacgagaacctgccgactagcgcctccgtgtccacccacatgacagcaggagcgatggccgggatcctggagcactcggtcatgtacccggtggactcggtgaagacacgaatgcagagtttgagtccagatcccaaagcccagtacacaagtatctacggagccctcaagaaaatcatgcggaccgaagcttctggaggcccttgcgaggcgtcaacgtcatgatcatgggtgcagggccrgcccatgccatgtattttgcctgctatgaaaacatgaaaaggactttaaatgacgttttccaccaccaaggaaacagccacctagccaacggtattttgaaagcgtttgtctggagttagaaagttctcttcttcaacacgtccctccccagggtgttcctccctgtgacccagccgcctcgacttcggcccgcttgctcacgaataaagaactcagagttgtgtgtgcaatgcacacccagacacacgcacgcacacacacgcgcgcgcacacacatgcttttttctgttcccctccgctttctgaagcctggggagaaatcagtgacagaggtgttttggttttattgttatgtgggttttcttttgtattttttttgtttgttttgtttttaaacattcaaaagcaattaatgatcagacataggagaaaccctgaatagaaacaaaacttttgaatgctggattcaaaaaaaaaaaaaagttatctggacagcttctttgagactatttaaaaactggtacaacaggtctctacaacgccaagatctaactaagctttaaaaggtcaagaagttttatggctgacaaaggactcgcgcaacgcagaaggcctttcccaccttaagcttccggggatctgggaattttacccccattctcttctgtttgtctgagtctcatctctctgcaagcaagggctgaaatcattttgtttggttgttttgagggagagaggcggggtgggggggtgcaaatctgccagcagctcttacgtaaggcatgttttattggggagggctgagcttttattttctcctctccagtggggttggcttttattgtttcttgtttgggtttggaatggaaatatggatagcagcataaagtacttttattttgacaaaattcatttttttcaacaatggagacatagatttgacccacaataacttctccccctctctttttactctgctcaaaaagcatctctcctcccattacccaaccttggtcataagtgtgcctggctggtttgcagatatttgttctgctttgtaaaaattggccattagtgcatttattgagatgatctctaaagagctatgccctgacctacccctgattctatgacattggggcccttcttttgctgaaactgccttacgtaatggttttactccttgaaagagatttgacggaatccattttatgccaagtgctgccctgcactgtttctgcaatatgtggtgtatgctgtggtgatcttgctgggaatgattataagtgtgtgtgtggtgggggagtgggtattacatgcattgctgaagagtcaaaaaaaaaaaaaaaaaactcga

SEQ ID NO: 174 - DNA, 1369 bp, Homo sapiens
ggagccttggtggaattctgcatcatcatctccttttttttttttttttttttttttttttttttcctctgggattatatcagaatacaactgaatgagcgattgggttgatcccggataactgtgtccatgggttatagtagaatcttggccacatgggagactgctattagctactggaggtgctgctggtaaagcaggtgtaaaagaaggcctcactggggactgctggaagctggtcccagaaagatttccatgtccctgcttcacagaagaaaaatttgggcttccaacagggattgatggtgaatcaggaacaaatgaaggagggcctacctgccttcgctcattagtctgcatgaaagtttgggtggagggtgaattaattgatccttgttgtatattctgctgctgtaaaacctgccccatttgctgttggtgttgtggagactgctgaaggggtcctagaggttgcataaaatcacaaggtaagtcggaactgtagaagggaatctgggacacagatgtcctactactacttatctcagagcccaccataccatgctgctccatttccatcctctgctgcaaagctctttgtctatctacctcctgcatgagttggatccgttgtctctcttgctgttctcgtaaacgttccttacgttcccgttcttgaaaactttcactaaagggattgttgtcatcaaattctacccgaggtggtgkstcactctgtggatttgcatttgagactgtccctggggctggtgtacaagtttttattggtaactgggcaattgggggctgaattctaggaggattgaggggcaggtgggcagragcactgttgggttgccatccaggtaaactgggcattctaacagggctagtatggccagaaataactgttgtgtgctgctggtgctgaagctgctgtggcaccatgggaaaggtgggttggctcatggtgggtggagtggcacctggaattaggggtggctggggctggacactgggcatcatggtaggtggggccattgcacattgctgctgctgtttgatccgataatcttcaatcaattcagcatgttctttctgttgtttacgaatctgttctagctgtttctgaaccatgctttgctgttcagtaacatgcttgagttgttctgcatcttcctctggaaattcacgcccagctttcttggcagtacgttgtttagctgaaagggccttcttagattttctgtgagcaccaatttgttcttcaagatacttctgctgcatttgaagcagctgttgggtctcctggrgccactcttcatactgcttacgctgtgaatcattgacaaagccgggaccaaaattt

SEQ ID NO: 175 - DNA, 2379 bp, Homo sapiens
  SITE (44): n equals a,t,g, or c
  SITE (1881): n equals a,t,g, or c
ggcagagctagtgtggactccatccccctggagtgggatcacgnctatgacctcagtcgggacctggagtctgcaatgtccagagctctgccctctgaggatgaagaaggtcaggatgacaaagatttctacctccggggagctgttgscttatcaggggaccacagtgccctagagtcacagatccgacaactgggcaaagcctggatgatagccgctttcagatacagcaaaccgaaaatatcattcgcagcaaaactcccacggggccggagctagacaccagctacaaaggctacatgaaactgctgggcgaatgcagtagcagtatagactccgtgaagagactggagcacaaactgaaggaggaagaggagagccttcctggctttgttaacctgcatagtaccgaaacccaaacggctggtgtgattgaccgatgggagcttctccaggcccaggcattgagcaaggagttgaggatgaagcagaacctccagaagtggcagcagtttaactcagacttgaacagcatctgggcctggctgggggacacggaggaggagttggaacagctccagcgtctggaactcagcactgacatccagaccatcgagctccagatcaaaaagctcaaggagctccagaaagctgtggaccaccgcaaagccatcatcctctccatcaatctctgcagccctgagttcacccaggctgacagcaaggagagccgggacctgcaggatcgcttgtsgcagatgaatgggcgctgggaccgagtgtgctctctgctggaggagtggcggggcctgctgcaggatgccctgatgcagtgccagggtttccatgaaatgagccatggtttgcttcttatgctggagaacattgacagaaggaaaaatgaaattgtccctattgattctaaccttgatgcagagatacttcaggaccatcacaaacagcttatgcaaataaagcatgagctgttggaatcccaactcagagtagcctctttgcaagacatgtcttgccaactactggtgaatgctgaaggaacagactgtttagaagccaaagaaaaagtccatgttattggaaatcggctcaaacttctcttgaaggaggtcagtcgtcatatcaaggaactggagaagttattagacgtgtcaagtagtcagcaggatttgtcttcctggtcttctgctgatgaactggacacctcagggtctgtgagtcccayatcaggaaggagcaccccaaacagacagaaaacgccacgaggcaagtgtagtctctcacagcctggaccctctgtcagcagtccacatagcaggtccacaaaaggtggctccgattcctccctttctgagccarggccaggtcggtccggccgcggcttcctgttcagagtcctccgagcagctcttccccttcagcttctcctgctcctcctcatcgggcttgcctgccttgtaccaatgtcagaggaagactacagctgtgccctctccaacaactttgcccggtcattccaccccatgctcagatacacgaatggccctcctccactctgaactaagcagatgccatctgcagaagtgctggtagcataaggaggatcgggtcataagcaatcccaaactaccaacaagaggaccttgatcttggcgaaagccmtcggtgtggcagctttagcctcctccagatcacatgtgtgcaaattatggcttcagaggtggaagataaacagtgacgggggaacaaacagacaacaagaaggtttggaagaaatctggtttgagactctgaaccttagcactaaggagattgagtaaggacctccaaagttccccggactcatgaattctgggcccttggccnattctgtgcacagccaaggacttcagtagaccatctgggcagctttcccatggtgctgctccaaccatcagataaatgaccctcccaagcaccatgtcagtgtcgtacaatctaccaaccaaccagtgctgaagagattttagaaccttgtaacatacaatttttaagagcttatatggcagcttcctttttaccttgttttcctttggggcatgatgttttaacctttgctttagaagcacaagctgtaaatctaaaaggcacttttttttagaggtataaagaaaaactagatgtaataaataagatcatggaaggctttatgtgaaaaaagttgaatgttatagtaaaaaaaaaagatatttatgtatgtacagtttgctaaagccaagttttgtttgtattgatttctttgcatttattatagatattataaaataaaaaaaaaaaaaaaaaaactcgagggggggcccggtacccaattcgccctatagtgag

SEQ ID NO: 176 - DNA, 1348 bp, Homo sapiens
  SITE (407): n equals a,t,g, or c
  SITE (408): n equals a,t,g, or c
  SITE (1331): n equals a,t,g, or c
gcgccttcacgatgccggcggtcagtggtccaggtcccttattctgccttctcctcctgctcctggacccccacagccctgagacggggtgtcctcctctacgcaggtttgagtacaagctcagcttcaaaggcccaaggctggcattgcctggggctggaatacccttctggagccatcatggaggtgaggggcaggggtggggaccgctatgcccagggtccctcaaagtgctggaggggctgtracttggtggggagtgggtctgtcacagccatcctctgtccagggtggggcaaggcctgggacagtgccaggcaccccaggaccccttccaggcttgtctcctgctccaccgcctcaacaccccccacccctgcccaagctgtttctcctctgcctctctnnttccctgccccaggacttctctcttctcctctgcctctccttggacccctgcccttcctctacctctgacctgtgaacacacagacacatgctcacacactaagtcccargcacacmsaaaggcaatgtggaccagcacaaacctccactctcccggctccatcccarcgggcctgtggctggccatgaaaactgggggctacctggagggaagcatcctcatcccaggtgagtgggcaccagcccttccctgtatgtgtgttgtgggtggaagcaggcatgagagcatcttagcccataggtttgtattcagggacttccaaacccagacctacaaagagtgtgtcttctaccagatcttgttcaaaaaagggtttgtgatgatggaactacacgatagagggagtgagcaagaacaatgaggattagagtggagcgtgaaatagtctaggagcatggcttccaaaacatatgctgtgaggtctgtccacctgagagttgggccatggatttaattctgagcctcttagcaggcaaagcaaagacagaaagcagatcggctgtggatttctgtctataaaatgtgagttcttggccgggtgcggtggctcacgcctgtaatcccggcgctttgggaggccagggcggatgggtcgcgaggtcaggaggttggaaaccatcctggccggaatggtgaagccctgactctactagaagtgcaaagattggctgggtgtggtggcgtgcgcctgtggtcccagcttctcgggaggctgaggcgggagagttgcttgggcctgggaggccgaggttgcggtgagctgagatcctgccattgcacttcagcctgggcacagagccagactctggctcaaaaaaaaaaaaaaaaaaaactcgaggggggcccgtacccaattcgccgnatatgatcgtaaacaat

SEQ ID NO: 177 - DNA, 1502 bp, Homo sapiens
  SITE (446): n equals a,t,g, or c
  SITE (470): n equals a,t,g, or c
  SITE (1024): n equals a,t,g, or c
ctcaaaataaataaataaataaaaatttgtattccattgatttgggtagacaccaggaatgtgcatttctaacaagctttccaggcgatcctatagtaagtcatctgtggactactttaagaaactcttctatagagaatggagttggattaataataggtgattttttacactggactgattcacaagaacctaaacagtagtccatgaagctgctcatctgtggtaactatttggccccgtctcactctgaaagcagcaggagatgttgtttactttgtttctatcccctttgtctggagattaattttggaatgaaagtttttctctctatgccattcctggttcttttccaaagcctcatacaagaggattaggtcacaatgcatgcattaccttttaaaagaatgcgatattgataccgatgcttactttttttttttttnactacttgttttattccttc[450 bp omitted]cttccttggtatagtggaggatttgaggattggaatatagagtagagtgcttgcttaagcctgggagcccatctttatagctatttgatgtaagaaaagagacatggnccatttctaaactatataaggtgagtgtgtctattcccagcagatataaaggaaaaaggaaacttttttgattcccaccttcccagcctcacctagccatcttccagcctcaaatatagagatgttagtgcaaggtcctgggctctaggtgatcatttcataagtcctttacagataaagaaaaagtagtgtttgtatgtttgtttttaagtaaccccaaaacaaatttatattgtattcagcaaaattggaattcaggtgtttaattttagaacatgaagtgcctgctgttttaagcattgacttgtataaaaagaattgcatgtctccagtaagcttatgggttttctcatttttaggtatatggcttttaatcatgtaaagtgaaacattagttttcttgcattttattacaggttctttgttgcaataaagatgctgctgaaattaattgaaaaaaaaaaaaaaaaaaactcga

SEQ ID NO: 178 - DNA, 1637 bp, Homo sapiens
attttctagcccacaaggactgaagttcagatccaaaagttcacttgctaattatcttcacaaaaatggagagacttctcttaagccagaagattttgattttactgtactttctaaaaggggtatcaagtcaagatataaagactgcagcatggcagccctgacatcccatctacaaaaccaaagtaacaattcaaactggaacctcaggacccgaagcaagtgcaaaaaggatgtgtttatgccgccaagtagtagttcagagttgcaggagagcagaggactctctaactttacttccactcatttgcttttgaaagaagatgagggtgttgatgatgttaacttcagaaaggttagaaagcccaaaggaaaggtgactattttgaaaggaatcccaattaagaaaactaaaaaaggatgtaggaagagctgttcaggttttgttcmaagtgatagcaaaagagaatctgtgtgtaataaagcagatgctgaaagtgaacctgttgcacaaaaaagtcagcttgatagaactgtctgcatttctgatgctggagcatgtggtgagaccctcagtgtgaccagtgaagaaaacagccttgtaaaaaaaaaagaaagatcattgagttcaggatcaaatttttgttctgaacaaaaaacttctggcatcataaacaaattttgttcagccaaagactcagaacacaacgagaagtatgaggatacctttttagaatctgaagaaatcggaacaaaagtagaagttgtggaaaggaaagaacatttgcatactgacattttaaaacgtggctctgaaatggacaacaactgctcaccaaccaggaaagacttcactgaagataccatcccacggaacacagatagaaagaaggaaaacaagcctgtatttttccagcaaatataacaaagaagctcttagccccccacgacgtaaagcctttaagaaatggacacctcctcggtcaccttttaatctcgttcaagaaacactttttcatgatccatggaagcttctcatcgctactatatttctcaatcggacctcaggcaaaatggcaatacctgtgctttggaagtttctggagaagtatccttcagctgaggtagcaagaaccgcagactggagagatgtgtcagaacttcttaaacctcttggtctctacgatcttcgggcaaaaaccattgtcaagttctcagatgaatacctgacaaagcagtggaagtatccaattgagcttcatgggattggtgcaccctgaagaccacaaattaaataaatatcatgactggctttgggaaaatcatgaaaaattaagtctatcttaaactctgcagctttcaagctcatctgttatgcatagctttgcacttcaaaaaagcttaattaagtacaaccaaccacctttccagccatagagattttaattagcccaactagaagcctagtgtgtgtgctttcttaatgtgtgtgccaatggtggatctttgctactgaatgtgtttgaacatgttttgagatttttttaaaataaattattatttgacaacaatccaaaaaaaaaaaaaaaaaaaaaaaaaaaaaaaaaaaaaaaaaaaaaaaaaaaaaaaaaaaaaaa

SEQ ID NO: 179 - DNA, 2911 bp, Homo sapiens
  SITE (622): n equals a,t,g, or c
ggtggtttttgttctgcaataggcggcttagagggaggggctttttcgcctatacctactgtagcttctccacgtatggaccctaaaggctactgctgctactacggggctagacagttactgtctcagctctaggatgtgcgttcttccactagaagctcttctgagggaggtaattaaaaaacagtggaatggaaaaacagtgctgtagtcatcctgtaatatgctccttgtcaacaatgtatacattcctgctaggtgccatattcattgctttaagctcaagtcgcatcttactagtgaagtattctgccaatgaagaaaacaagtatgattatcttccaactactgtgaatgtgtgctcagaactggtgaagctagttttctgtgtgcttgtgtcattctgtgttataaagaaagatcatcaaagtagaaatttgaaatatgcttcctggaaggaattctctgatttcatgaagtggtccattcctgcctttctttatttcctggataacttgattgtcttctatgtcctgtcctatcttcaaccagccatggctgttatcttctcaaattttagcattataacaacagctcttctattcaggatagtgctgaagangcgtctaaactggatccagtgggcttccctcctgactttatttttgtctattgtggccttgactgccgggactaaaactttacagcacaacttggcaggacgtggatttcatcacgatgcctttttcagcccttccaattcctgccttcttttcagaaatgagtgtcccagaaaagacaattgtacagcaaaggaatggacttttcctgaagctaaatggaacaccacagccagagttttcagtcacatccgtcttggcatgggccatgttcttattatagtccagtgttttatttcttcaatggctaatatctataatgaaaagatactgaaggaagggaaccagctcactgaargcatcttcatacagaacagcaaactctatttctttggcattctgtttaatgggctgactctgggccttcagaggagtaaccgtgatcagattaagaactgtggatttttttatggccacagtgcattttcagtagcccttatttttgtaactgcattccagggcctttcagtggctttcattctgaagttcctggataacatgttccatgtcttgatggcccaggttaccactgtcattatcacaacagtgtctgtcctggtctttgacttcaggccctccctggaatttttcttggaagccccatcagtccttctctctatatttatttataatgccagcaagcctcaagttccggaatacgcacctaggcaagaaaggatccgagatctaagtggcaatctttgggagcgttccagtggggatggagaagaactagaaagacttaccaaacccaagagtgatgagtcagatgaagatactttctaactggtacccacatagtttgcagctctcttgaaccttattttcacattttcagtgtttgtaatatttatcttttcactttgataaaccagaaatgtttctaaatcctaatattctttgcatatatctagctactccctaaatggttccatccaaggcttagagtacccaaaggctaagaaattctaaagaactgatacaggagtaacaatatgaagaattcattaatatctcagtacttgataaatcagaaagttatatgtgcagattattttccttggccttcaagcttccaaaaaacttgtaataatcatgttagctatagcttgtatatacacatagagatcaatttgccaaatattcacaatcatgtagttctagtttacatgccaaagtcttccctttttaacattataaaagctaggttgtctcttgaattttgaggccctagagatagtcattttgcaagtaaagagcaacgggaccctttctaaaaacgttggttgaaggacctaaatacctggccataccatagatttgggatgatgtagtctgtgctaaatattttgctgaagaagcagtttctcagacacaacatctcagaattttaatttttagaaattcatgggaaattggatttttgtaataatcttttgatgttttaaacattggttccctagtcaccatagttaccacttgtattttaagtcatttaaacaagccacggtggggcttttttctcctcagtttgaggagaaaaatcttgatgtcattactcctgaattattacattttggagaataagagggcattttattttattagttactaattcaagctgtgactattgtatatctttccaagagttgaaatgctggcttcagaatcataccagattgtcagtgaagctgatgcctaggaacttttaaagggatcctttcaaaaggatcacttagcaaacacatgttgacttttaactgatgtatgaatattaatactctaaaaatagaaagaccagtaatatataagtcactttacagtgctacttcacacttaaaagtgcatggtatttttcatggtattttgcatgcagccagttaactctcgtagatagagaagtcaggtgatagatgatattaaaaattagcaaacaaaagtgacttgctcagggtcatgcagctgggtgatgatagaagagtgggctttaactggcaggcctgtatgtttacagactaccatactgtaaatatgagctttatggtgtcattctcagaaacttatacatttctgctctcctttctcctaagtttcatgcagatgaatataaggtaatatactattatataattcatttgtgatatccacaataatatgactggcaagaattggtggaaatttgtaattaaaataattattaaacctaaaaaaaaaaaaaaaaaaaactcgag

SEQ ID NO: 180 - DNA, 519 bp, Homo sapiens
ggcacgagccccaggccagccagggccaggcctactttggccacccttaaattagaatgtggggtcaggggtcacagaaaagccatttctctgacctagtgtttggcgtccgggaactctgtgcccaaccttcagaccctggcagtcctcactgaggccattggcccagagcccgccatcccccgaracccccgggagccgcctgttgccacgtccacacctgccacaccctctgccgggccccagcccctcccaaccgggaccgtgctggtccctgggggtcctgccccaccttgccttggggaggcatgggccctcctcctcccaccctgccggccgtcactcacctcttgcttctggtcccccaggcctagcccttggaaggagacaggagtctagggaggctgaagcccactcccggggaggcccgtgctcctccagccccagggacagcaaggaaaagagaagagagcagagcatttcatggctctaataaaaaaaaaaaaaaaaaaaactcga

SEQ ID NO: 181 - DNA, 968 bp, Homo sapiens
  SITE (35): n equals a,t,g, or c
  SITE (45): n equals a,t,g, or c
  SITE (135): n equals a,t,g, or c
tccccttggggccggaaaaagcggggttggcctgnccattggttntccatgccgcccgcccatgccccagtactagcctgcagtcccaatgtagcccctccctcytccmagagcccytcmaaccgccccgstcanttgtgatttcaggaggatttgatgaagatgttaaagcgaaagtggagaaccttctcgggatttccagcctggaaaaaacggaccctgttaggcaagcaccctgcagccctccctgtccccttcttcccctccccttcycccgcccgtggagacagctgttytcagcagggctctccgcagggagggggccggctccttccctggcagcaacatccttgcccttgtcacacaagtcagcctccatctgcgcagctctgtggatgcgctgctggagggcaacaggtatgtcactggctggttcagcccctaccaccgccagcggaagctcatccacccggtcatggttcagcacatccagcccgcagcgctcagcctcctggcacagtggagcaccctcgtgcaggagctggaggctgccctgcagctggctttctacccggatgccgtggaggagtggctggaggaaaacgtgcaccccagcctgcagcggctgcaarctctgctgcaggacctcagcgaggtgtctgcccccccgctgccacccaccagccctggcagggacgttgctcaggacccctgaggggagagctcatgccagggggctcctgctggaggctgggggggctctgcwytkycwwwtggcctgggcaatacggcccacgtgggcgtcgtgccctctggcccagcagtgtcttgcccacactcagttcctgagggccctgggcagcccctgggggagagactagaaaacacagaaggaagcagcacagggagacccgctttgtgatctgcatgtgtgacactgattctttggaaataaagagtggaagctg

SEQ ID NO: 182 - DNA, 1128 bp, Homo sapiens
tgtaaaagttatcagtaatcctaattcttttcctgggttttccttttgtcacttattaatcagtttttgaaaggacgaatgaatttagagatgtactctggagcagtatcatgttaaaccaggggtatattagaaaaatcatcctcataatcattctgggaagtttttcctccccaaaaaaagccatcctgatgggttttcaaaaccagaaaaaagctcttaatgaggaacagaccactggagtacccatgagcatctcaggaaaactgagaccctcgagaagccttgatttcgtgcaacccccaaggtttcagagccagcagcccagtgctgtggttgacagacgtggttttktggrgaaagcagccagaggccaggaattttcagagtcgtgagtcacgrtytcccacccaagattagagcamagattagccatactgagatttggtaaaatcattctgtctaagcaatggaggtgtgtgcamacgtgcagtgcctgttcacaggggatgcaggcagatcsygggtttaggatggggraggccaccgcacccccyttcaytgctctgcacctgctccctcacgtggacactgtccacaactgtggctctcacaggacagttgcccaaggagctcatatcttattggagatagggggtcgtacaggtgacattcatgagcagtgtgagccgggtgacatgggggtgtcaacccagcatctgtccaggagctcctcctgcagcggctctggcaggtggcctgaggctcctttttgagagagaactgtttggccttcctgtctcctctcctctgatctgttctttcttggaacaccacccaagaacgtcacctcctccatcagattgtgagctcctggagggcaggagctgtgtccttctattcatcttcctatccccagaaccttgcacagatcctggaatgtggtaggtgctcagtaaatgtgtgttgaataaatgaatgaatgaatgaacaaatgaatgaatttgcttacttcaaggcaaaagaaccatgaaactgtattttgagtttctatgttatagcagtcagcaaatcctattaaatactttgtgtttccaagcaaaaaaaaaaaaaaaaaaaaaaactcga

SEQ ID NO: 183 - DNA, 2276 bp, Homo sapiens
ccgcggcgtctgacctcatggcgtagagcctagcaacagcgcaggctcccagccgagtccgttatggccgctgccgtcccgaagaggatgagggggccagcacaagcgaaactgctgcccgggtcggccatccaagcccttgtggggttggcgcggccgctggtcttggcgctcctgcttgtgtccgccgctctatccagtgttgtatcacggactgattcaccgagcccaaccgtactcaactcacatatttctaccccaaatgtgaatgctttaacacatgaaaaccaaaccaaaccttctatttcccaaatcagcaccaccctccctcccacgacgagtaccaagaaaagtggaggagcatctgtggtccctcatccctcgcctactcctctgtctcaagaggaagctgataacaatgaagatcctagtatagaggaggaggatcttctcatgctgaacagttctccatccacagccaaagacactctagacaatggcgattatggagaaccagactatgactggaccacgggccccagggacgacgacgagtctgatgacaccttggaagaaaacaggggttacatggaaattgaacagtcagtgaaatcttttaagatgccatcctcaaatatagaagaggaagacagccatttcttttttcatcttattatttttgctttttgcattgctgttgtttacattacatatcacaacaaaaggaagatttttcttctggttcaaagcaggaaatggcgtgatggcctttgttccaaaacagtggaataccatcgcctagatcagaatgttaatgaggcaatgccttctttgaagattaccaatgattatattttttaaagcactgtgatttgaatttgcttatgtaattttatttgcttgactttttatatgatattgtgcaaatgtttgccataggcaattggtacttaaatgagaggtgagtctctcttttgccttggtgctttggaaattaaatgtcacaaacgagtatataattttttatctgtacttttagagctgagtttaatcaggtgtccaaaatgtgagttaaacattaccttatatttacactgttagtttttattgttttagatttattatgcttcttctggaagtattagtgatgctacttttaaaagatcccaaacttgtaactaaattctgacatatctgttactgctgactcacattcattctccgccattcaaatactattttttatccacatttttttttgttcccaaactgtaatgtacaaggatatgtgtgataatgctttggatttgagtaatatttttttttcttccaagaaaactgctttggatatttttagataatttaaacataatttaggataatgatattgctcaatctgaccacaattttaggtaaaacattaaatgtgtcagaaatcttggcaacagagactctgcagcttgcagtggacatagataaaatgttacagagatactatttttttggttggaattactatattaaatttagaagcagaaactggtaaaatgttaaatacatgtacaattgcttttagttagcaattgattgtagcatgggttcctccaaggtttcaagcaatgggcagagtttaaaattatatcagattcgtttacttcgtttattattttacagtaaatttgaataaatcttaggggtcattatcacttaaataatactgtacctaggtctttcaaattaaaattatacctgaatgaagttgtttgtatacataaaggatatttgtgtacaattaccttttttcccccacacttgttttctttgtttttgttttttatggcaactggaaagtatttactatgggattcatttatgtctgtctttctatcataaagaattgatcaatatgtaaatatgtgatttgaaccatggttgacttacaagtgtcactacagctttttagaaaacatagccctaatatatgttaagcaggacccgggtgagccagtgggcttgcgctttatgtagagctggaagaaggccgtccatcctgtctcttgggcggacagtgtactttcctaatagggaagggaagcacaatggaaatacccctgaaccgttttattgcagtaatttttttcatatctgaaactattatttaatattttgaataagattttaaaaaataaatggcaaagatataaatctaaaaaaaaaaaaaaaaaaaaaaaaaaaaaaaaaaaaaaaaaaaaaaaaaaaaaaaaaaaaaaaaaaaa

SEQ ID NO: 184 - DNA, 3374 bp, Homo sapiens
ggcggcagtgtccaagctacgccactcgggctggggcgttgggagcgggagtgcagagcgtggtcgtggcggcggcggtgagaagagcgaggcggaggagggggtgccatggccgggcagcagttccagtacgatgacagtgggaacaccttcttctacttcctcacctccttcgtggggctcatcgtgatcccggcgacatactacctctggccccgagatcagaatgccgagcaaattcgattaaagaatatcagaaaagtatatggaaggtgtatgtggtatcgtttacggttattaaaaccccagccaaatattattcctacagtaaagaaaatagttctgcttgcaggatgggcattgttcttattccttgcatataaagtttccaaaacagaccgagaataccaagaatacaatccttatgaagtattaaatttggatcctggagccacagtagcagaaattaaaaaacaatatcgtttgctgtcacttaaatatcatccagataaaggaggtgatgaggttatgttcatgaggatagcaaaagcttatgctgctttaacggatgaagagtcccggaaaaattgggaagaatttggaaatccagatgggcctcaagccacaagctttggaattgccctgccagcttggatagttgaccagaaaaattcaattctggttttacttgtatatggattggcatttatggttatccttccagttgttgtgggctcttggtggtatcgctcaatacgctatagtggagaccagattctaatacgcacaacacagatttatacatactttgtttataaaacccgaaatatggatatgaaacgtcttatcatggttttggctggagcttctgaatttgatcctcagtataataaagatgccacaagcagaccaacggataatattctaataccacagctaatcagagaaattggcagcattaatttaaagaagaatgagcctccacttacctgcccatatagcctgaaggccagagttcttttactgtctcatcttgctagaatgaaaattcctgagacccttgaagaagatcagcaattcatgctaaaaaagtgtcctgccctacttcaagaaatggttaatgtaatctgccaactaatagtaatggcccggaaccgtgaagaaagggagtttcgtgctccaactttggcatccctagaaaactgcatgaagctttctcagatggccgttcagggacttcagcaatttaagtctccccttctgcagctccctcatattgaagaggacaatcttagacgggtttctaatcataagaagtataaaattaaaactatccaggatttggtgagtttaaaagaatcagatcgtcacactctactgcacttccttgaagatgaaaaatatgaagaggttatggctgtccttgggagttttccatatgtgaccatggatataaaatcacaggtgttagatgatgaagatagcaacaacatcacagtaggatccttagttacagtgttggttaagttgacaaggcaaacaatggctgaagtatttgaaaaggagcagtccatctgtgctgcagaggaacagccagcagaagatgggcagggtgaaactaacaagaacaggacaaaaggaggatggcaacagaagagtaaaggacccaagaaaactgctaaatcaaaaaaaaagaaacctttaaaaaaaaaacctacacctgtgctattaccacagtcaaagcaacagaaacaaaagcaggcaaatggagtcgttgggaatgaagctgcagtaaaggaagatgaagaagaagtttcagataagggcagtgattctgaagaagaagaaaccaatagagattcccaaagtgagaaagatgatggtagtgacagagactctgatagagagcaagatgaaaaacaaaacaaagatgatgaagcagagtggcaagaattacaacaaagcatacagcgaaaagagagagctctattggaaaccaaatcaaaaataacacatcctgtgtatagcctttactttcctgaggaaaaacaagaatggtggtggctttacattgcagataggaaggagcagacattaatatccatgccatatcatgtgtgtacgctgaaagatacagaggaggtagagctgaagtttcctgcaccaggcaagcctggaaattatcagtatactgtgtttctgagatcagactcctatatgggtttggatcagattaaaccattgaagttggaagttcatgaggctaagcctgtgccagaaaatcacccacagtgggatacagcaatagagggggatgaagaccaggaggacagtgagggctttgaagatagctttgaggaagaagaggaggaagaagaagatgatgactaagcagtactctgaatggaccacagtgtttgcacatatttgcaattttttgctgttttggaagtgtatcataaaccagaaacagtacagaactgatgttgagggaggtgtagtttttttactctagaaatgggtgcataatataactaggcagtggcggtgccttggtacaacctgaaaaatgttaaggcttattgaaacctttcaagtaggggatggtacatttatttcatctgcaaatgataataaatcctttgttattataactgtccagaagtgtgggctatgtattatctgatcagtctatggtcccagtaaaagtaaagatgcaggaaacacagtctgtaaatgagcgacttttctttgttcagctttagttttagcaaacaccacaaatatgttttaagtaacatcgctcaagtttaagtaacatcgctcaagttgataatctcttgataagctctgttgttgacattttgcagtgatacaacagctccactcatagatttaaacttttatttttacttatcttggtcataagttggcattctctcacattccacatgatatagagggctacgttttggaattttccttttcttaattgcccagagttatcagacagattataaaaatggcttttaatggcttaaaccatttctaaacctctatcttagcagatcaatgcaggatctaattcttttgataagttctagctctaaaagtgatagtgggactgtatgttttctgatactggtggcttatgttattaaaccttttttaaaaaaggttcactctaaaagctgaactacatccttagttttcagtctacttgactctatcaggagctttttaaggaaagtaagtataacatgcaaaggaagctttttttgtattcattttggactcctgtcaataaaaatagaagtttgttgactcgtaaaaaaaaaaaaaaaaaaaaaaaaaaaacccccggggggggcccc

SEQ ID NO: 185 - DNA, 1337 bp, Homo sapiens
  SITE (1337): n equals a,t,g, or c
cttccggttctccgggcagctgccactgctgtagcttctgccacctgccacgaccgggcctctccctggcgtttggtcacctctgcttcattctccaccgcgcctatggtccctcttggagccagcgtggcgggcctggcggctcccgggtggtgagagagcggtccgggaacgatgaaggcctcgcagtgctgctgctgtctcagccacctcttggcttccgtcctcctcctgctgttgctgcctgaactaagcgggyccctggmagtcctgctgcaggcagccgaggccgcgccaggtcttgggcctcctgaccctagaccacggacattaccgccgctgccaccgggccctacccctgcccagcagccgggccgtggtctggctgaagctgcggggccgcggggctccgagggaggcaatggcagcaaccctgtggccgggcttgagacggacgatcacggagggaaggccggggaaggctcggtgggtggcggccttgctgtgagccccaaccctggcgacaagcccatgacccagcgggccctgaccgtgttgatggtggtgagcggcgcggtgctggtgtacttcgtggtcaggacggtcaggatgagaagaagaaaccgaaagactaggagatatggagttttggacactaacatagaaaatatggaattgacacctttagaacaggatgatgaggatgatgacaacacgttgtttgatgccaatcatcctcgaagataagaatgtgccttttgatgaaagaactttatctttctacaatgaagagtggaatttctatgtttaaggaataagaagccactatatcaatgttgggggggtatttaagttacatatattttaacaacctttaatttgctgttgcaataaataccgtatccttttattatatctttatatgtatagaagtactctrttaatgggctcagagatgttggggataaagtatactgtaataatttatctgtttgaaaattactataaaacggtgttttctgatcggtttttgtttcctgcttaccatatgattgtaaattgttttatgtattaatcagttaatgctaattatttttgctgatgtcatatgttaaagagctataaattccaacaaccaactggtgtgtaaaaataatttaaaatttcctttactgaaaggtatttcccatttttgtggggaaaagaagccaaatttattactttgtgttggggtttttaaaatattaagaaatgtctaagttattgtttgcaaaacaataaatatgattttaaattctcttaaaaaaaaaaaaaaaaaccccgggggggggcccggn

SEQ ID NO: 186 - DNA, 941 bp, Homo sapiens
ggcacgagcctggacgcagcagccaccgccgcgtccctctctccacgaggctgccggcttaggacccccagctccgacatgtcgccctctggtcgcctgtgtcttctcaccatcgttggcctgattctccccaccagaggacagacgttgaaagataccacgtccagttcttcagcagactcaactatcatggacattcaggtcccgacacgagccccagatgcagtctacacagaactccagcccacctctccaaccccaacctggcctgctgatgaaacaccacaaccccagacccagacccagcaactggaaggaacggatgggcctctagtgacagatccagagacacacaagagcaccaaagcagctcatcccactgatgacaccacgacgctctctgagagaccatccccaagcacagacgtccagacagacccccagaccctcaagccatctggttttcatgaggatgaccccttcttctatgatgaacacaccctccggaaacgggggctgttggtcgcagctgtgctgttcatcacaggcatcatcatcctcaccagtggcaagtgcaggcagctgtcccggttatgccggaatcattgcaggtgagtccatcagaaacaggagctgacaaccygctgggcacccgaagaccaagccccctgccagctcaccgtgcccagcctcctgcatcccctcgaagagcctggccagagagggaagacacagatgatgaagctggagccagggctgccggtccgagtctcctacctcccccaaccctgcccgcccctgaaggctacctggcgccttgggggctgtccctcaagttatctcctctgytaagacaaaaagtaaagcactgtggtctttgcaaaaaaaaaaaaaaaaaaaaaaaaaaaaaaaaaaaaaaaaaaaaaaaaaaaaaaactcga

SEQ ID NO: 187 - DNA, 678 bp, Homo sapiens
ggcacgaggcagcttgtgctttaaaggaggtgttcaaagcatgtctgagcagagacttttgggctctgttttaattaatactttaaaataattcatatttaaaatatcagatgtttccataaagaggaggatgtttaaatgcctccagactacattcctttttattcttgattttacctgggagtccaaagttcaattccataaagcaagcgtttatttgtcactttcaatatacatcgattgccatgcttaagatgcaatatgggctgcggaaataggttaacccacaggctcccagggcccagtgtagaaggtgagagattcgtgtaaaatgattcaaataaaaggaagaccctggccgggtgccgtagctcacgcctgtaatcccagcactttgggaggccgaagcgagtggatgacgaggttaggagttggagaccagcctggccaacatcgtgaaaccccgtctctactaaaaatacaaaaattagccgggcatggtggcaggcacctgtaatcctagctagttgggaggctgaggcaggagaatcgtttgaatctgggagttggaggttgcagtgagctgagatcgcgccacagcactccagcctgggtgacagggtgagactctgtctcaaaaaaaaaaataaataaataaagtaaaaaaaaaaaaaaaaa

SEQ ID NO: 188 - DNA, 1848 bp, Homo sapiens
gaaactggaccggagaaccggagcgaagcgaagcggaagcccggaatgaggccggactggaaagccggagcggggccaggcgggcctccccaaaagcctgccccttcatcccagcggaaaccgccggcccggccgagcgcggcggccgctgcgattgcagtcgcggcggcggaggaagagagacggctccggcagcggaaccgcctgaggctggaggaggacaaaccggccgtggagcggtgcttggaggagctggtcttcggcgacgtcgagaacgacgaggacgcgttgctgcggcgtctgcgaggcccgagggttcaagaacatgaagactcgggtgactcagaagtggagaatgaagcaaaaggtaattttccacctcaaaagaagccagtttgggtggatgaagaagatgaagatgaggaaatggttgacatgatgaacaatcggtttcggaaggatatgatgaaaaatgctagtgaaagtaaactttcgaaagacaaccttaaaaagagacttaaagaagaattccaacatgccatgggaggagtacctgcctgggcagagactactaagcggaaaacatcttcagatgatgaaagtgaagaggatgaagatgatttgttgcaaaggactgggaatttcatatccacatcaacttctcttccaagaggcatcttgaagatgaagaactgccagcatgcgaatgctgaacgtcctactgttgctcggatctccatctgtgcagttccatcccggtgcacagattgtgatggttgctgggattagataatgctgtatcactatttcaggttgatgggaaaacaaatcctaaaattcagagcatctatttggaaaggtttccaatctttaaggcttgttttagtgctaatggggaagaagttttagccacgagtacccacagcaaggttctttatgtctatgacatgctggctggaaagttaattcctgtgcatcaagtgagaggtttgaaagagaagatagtgaggagctttgaagtctccccagatgggtccttcttgctcataaatggcattgctggatatttgcatttgctagcaatgaagaccaaagaactgattggaagcatgaaaattaatggaagggttgcagcatccacattctcttcagatagtaagaaagtatacgcctcttcgggggatggagaagtttatgtttgggatgtgaactcaaggaagtgccttaacagatttgttgatgaaggcagtttatatggattaagcattgccacatctaggaatggacagtatgttgcttgtggttctaattgtggagtggtaaatatatacaatcaagattcttgtctccaagaaacaaacccaaagccaataaaagctataatgaacttggttacaggtgttacttctctgaccttcaatcctactacagaaatcttggcaattgcttcagaaaaaatgaaagaagcagtcagattggttcatcttccttcctgtacagtattttcaaacttcccagtcattaaaaataagaatatttctcatgttcataccatggatttttctccgagaagtggatactttgccttggggaatgaaaagggcaaggccctgatgtataggttgcaccattactcagacttctaaagagactatttgaagtccagttgagtcacaagagaagcctgtcttgatatatcatctcagaaactttcctgaatatgtgataatatatggaaaatgatttatagatccagctgtgcttaagagccagtaatgtcttaataaacatgtggcagcttttgtttgaaaaaaaaaaaaaaaaaaaaaaaaaaaaaaaaaaactcga

SEQ ID NO: 189 - DNA, 1292 bp, Homo sapiens
gctgccttgctccacacctggtcaggggagagaggggaaagccaagggaagggacctaactgaaaacaaacaagctgggagaagcaggaatctgcgctcgggttccgcagatgcagaggttgaggtggctgcgggactggaagtcatcgggcagaggtctcacagcarccaaggaacctggggcccgctcctcccccctccaggccatgaggattctgcagttaatcctgcttgctctggcaacagggcttgtagggggagagaccaggatcatcaaggggttcgagtgcaagcctcactcccagccctggcaggcagccctgttcgagaagacgcggctactctgtggggcgacgctcatcgcccccagatggctcctgacagcagcccactgcctcaagccccgctacatagttcacctggggcagcacaacctccagaaggaggagggctgtgagcagacccggacagccactgagtccttcccccaccccggcttcaacaacagcctccccaacaaagaccaccgcaatgacatcatgctggtgaagatggcatcgccagtctccatcacctgggctgtgcgacccctcaccctctcctcacgctgtgtcactgctggcaccagctgyctcatttccggctggggcagcacgtccagcccccagttacgcctgcctcacaccttgcgatgcgccaacatcaccatcattgagcaccagaagtgtgagaacgcctaccccggcaacatcacagacaccatggtgtgtgccagcgtgcaggaagggggcaaggactcctgccagggtgactccgggggccctctggtctgtaaccagtctcttcaaggcattatctcctggggccaggatccgtgtgcgatcacccgaaagcctggtgtctacacgaaagtctgcaaatatgtggactggatccaggagacgatgaagaacaattagactggacccacccaccacagsccatcaccctccatttccacttggtgtttggttcctgttcactctgttaataagaaaccctaagccaagaccctctacgaacattctttgggcctcctggactacaggagatgctgtcacttaataatcaacctggggttcgaaatcagtgagacctggattcaaattctgccttgaaatattgtgactctgggaatgacaacacctggtttgttctctgttgtatccccagccccaaagacagctcctggccatatatcaaggtttcaataaatatttgctaaatgaaaaaraaaaaaaaaaaaaactcga

SEQ ID NO: 190 - DNA, 906 bp, Homo sapiens
  SITE (144): n equals a,t,g, or c
  SITE (145): n equals a,t,g, or c
actccctcacccaggtcccagccctgggaaccacctaccgtgagcccttttgcagatatagactcatttcatcctcagatggtccttcaaggtaggtactttagtcccattttagagatgagacgattgaggccagaggggtgnngtaacttgcctgggggctcacgagcacaaaaggagccgaggcaggatctgacccttgttctctggcctcactgccctcactttgccatgacccgaagttatgtccctacaaagcaatgcatggtccaaggytctttttattgtatttttatttttaagggtcctgttcaaaactggtgtgagctctgaggagtcctgaaccctgggtgcagcatcctagcatcctgggagtccttttctgcccacactgagctgggctcctcgaggggtggggctgctgtccctggaagcctggcagcagcactgtatcgggttggctgaagctgarcgccgtggggtgcagggctccmggaatccccgtttggctgaaggggttccctgtagccmgggatgtttatgaggtctctctgatgccccaggcgcaggacatgtgtgcgggtggagaaaagcaggccctttcagtgccagctccactcaatttctatgtggaccaagaacgataaacttaaaaaattttttttcctaaggtatcttcagaatatggtgtatttttatgtggaaaagaaaagttatgaaggcagctgttactttaagagaaaattcattaaaagtcctcgaggtatgaagatgacggcgtgcttctcaatcattttggcataacttgattgtggctgtaatttttttttttttttttgtcaagcatgtcagacaataaagtctttgtaaaaagrgaaaaaaaaaaaaaaaaaaaaaaaaactcga

SEQ ID NO: 191 - DNA, 1941 bp, Homo sapiens
  SITE (561): n equals a,t,g, or c
  SITE (1414): n equals a,t,g, or c
  SITE (1422): n equals a,t,g, or c
  SITE (1427): n equals a,t,g, or c
cttcagctgaagcccagggaccccttttccaccctgggccccaatgccgtcctttccccgcagagactggtcttggaaaccctcagcaaactcagcatccaggacaacaatgtggacctgattctggccacaccccccttcagccgcctggagaagttgtatagcactatggtgcgcttcctcagtgaccgaaagaacccggtgtgccggagatggctgtggtactgctggccaacctggctcagggggacagcctggcagctcgtgccattgcagtgcagaagggcagtatcggcaacctcctgggcttcctagaggacagccttgccgccacacagttccagcagagccaggccagcctcctccacatgcagaacccaccctttgagccaaytagtgtggacatgatgcggcgggctgcccgcgcgctgcttgccttggccaaggtggacgagaaccactcagagtttactctgtacgaatcacggctgttggacatctcggtatcaccgttgatgaactcaktggtttcacaagtcatttgtgatgtactgtttttgnattggccagtcatgacagccgtgggacacctcccccccccgtgtgtgtgtgcgtgtgtggagaacttagaaactgactgttgccctttatttatgcaaaaccacctcagaatccagtttaccctgtgctgtccagcttctcccttgggaaaaagtctctcctgtttctctctcctccttccacctcccctccctccatcacctcacgcctttctgttccttgtcctcaccttactcccctcaggaccctaccccaccctctttgaaaagacaaagctctgcctacatagaagactttttttattttaaccaaagttactgttgtttacagtgagtttggggaaaaaaaataaaataaaaatggctttcccagtccttgcatcaacgggatgccacatttcataactgtttttaatggtaaaaaaaaaaaaaaaaaatacaaaaaaaaattctgaaggacaaaaaaggtgactgctgaactgtgtgtggtttattgttgtacattcacaatcttgcaggagccaagaagttcgcagttgtgaacagaccctgttcactggagaggcctgtgcagtagagtgtagaccctttcatgtactgtactgtacacctgatactgtaaacatactgtaataataatgtctcacatggaaacagaaaacgctgggtcagcagcaagctgtagtttttaaaaatgtttttagttaaacgttgaggagaaaaaaaaaaaaggcttttcccccaaagtatcatgtgtgaacctacaacaccctgacctctttctctcctccttgattgtatgaataaccctgagatcacctcttagaactggttttaacctttagctgcagcgnctacgtcnawcgntgtgtatatatatgacgtkgtacattgcacatacccttggatccccacagttkggtcctcctcccagctacccctttatagtatgacgagttaacaagttggtgacctgcacaaagcgagacacagctatttaatctcttgcccagatatcgcccctcttggtgcgatgctgtacaggtctctgtaaaaagtccttgctgtctcagcagccaatcaacttatagtttatttttttctgggtttttgttttgttttgttttctttctaatcgaggtgtgaaaaagttctaggttcagttgaagttctgatgaagaaacacaattgagattttttcagtgataaaatctgcatatttgtatttcaacaatgtagctaaaacttgatgtaaattcctcctttttttccttttttggcttaatgaatatcatttattcagtatgaaatctttatactatatgttccacgtgttaagaataaatgtacattaaatcttggtaagactttaaaaaaaaaa

SEQ ID NO: 192 - DNA, 2118 bp, Homo sapiens
  SITE (13): n equals a,t,g, or c
  SITE (1324): n equals a,t,g, or c
  SITE (1643): n equals a,t,g, or c
aaataataataanaataaataaaaatwaagtgcttaktgtaactcagcggacagggctcccagctgctctggcacgtgggacaccytccaccctgcacacaacaggcatgcaaagaggactggatatggtggggtagagtgcttctggtgtgttcactttaagaaaacatctgccaagagagaagagtgcccaggaaagaccaggaaaatacaagtacatggctgcttcataccatataccccaattctttaaagcagcaaaaggcactttttttttcaggccagagtgaatctaaaacaaacctggctttgcttacagggaagctgtcccagaaggactgagtgatgcctcttgttccctaaggtctggagagtctttgcaagtttccaacgacatttccaaccaggtgggagagaccagcagttgacgagacaagtcagacccaaaaaacgacgccaaggtagtgagtgggtgcctatttgggagtaggatgatttgaggaaaacaggaagaaaaaccggtcagaaagtggcactttggaagtggaaagctgtttgcaaatagcaactctggctaaagcgaaaatgttaatcaagtagaaagtaaaattcaggatcttagaagctcatccttctgatgagaactatttttttttccgtgaaggaactattattactttaaaagtgagggtaatttacatatggggtgtatatattctaaaaatagtaataaaagtaccttttataagcaatgttgtgtggcttgtagaagaaagcagggaggaaaaaaaggcaggcaaaactagtctaggtctaggccctaaaaatgagcttccttcccacttgactggaaacgcccatgtgatttctaggctgaaaataggtaggatttaacgagtaacctagttcccttctgtctctgatttctgatcagctgatggagctgctagtaagaggggccgatcatgctcccagacgagtcctttggcctcttgctctccatcccaagcctgactccttcagcagcagccccctccttctgtgtccatctgatgcaggcaagcaggagcagtaagagggcatcccatgttccagttcaccttctatggggtgactargaggttcccggtaactagggcagcccargcccagcaggttgcaaaagcagctgcaagcttcagaaacccacttcctccaacaccagggaggtggcagagagcccatccaaaagcccactgggagaggcataagattctgtgccaggcccccaggtcccctctgtgtcaggtaggctctgctactggcctctgaagtaaaggcaaanacaaacgggcagggcagggtggcaggaataaaaaactctggacagaaacccttttaataaaggaaattccacccctcccaatccttccatggaagggtgagaccttaatgtgatgtaagaggaaggtcttctctggctttcagggaaacagctgcagctgaaacttaggggcccattccagggcacttttcaccacagccagtgcagccgctccaagtgccactgtcagccccatcactgccaatttcacaaagcggttggtccttggcttggtcaggacatcttttgttcgatcttcaggccgcagaagtccccgaanaccgctgccgcagcaccatatcaggcctctgctgggctgatgccagctcaaagtctttgaaagtagaggctgccgtcctctcagcttgctgttgggcagcggcctcccgagcaagttcggatgggggaaactgaacaaaaaggtctcctstctgctgatcagtgtctcatagggcaagtcctgagggatctgggacaacaggtggtggaccgaggccatgtcacagtcacagtccaggacttcctgctcgcgatacaacacaatcacggctgcaaagtaaatcggcatcagtgggtggcaggccaggaagaagtcatataaccgcacgacgtgcctgaagtcagacaggacatgcccaaaccaggtgatgagccagctgagggcaaagatggtccctacctcagcactctgcatgaagtcatggagctctggattcacctggtcaatgatgggcatcagatagtttaatatatgc

SEQ ID NO: 193 - DNA, 1538 bp, Homo sapiens
  SITE (112): n equals a,t,g, or c
  SITE (147): n equals a,t,g, or c
ccgggttcggctctgtgtcagcagccgggcggcgctcgggcgggacatggcagcctgtacagcccggcggcctggccgtgggcagccgctggtggtcccggtcgctgactgnggcccggtggccaaggccgctctgtgcgcggccgnagctggagccttctcgccagcgtcgaccacgacgacgcggaggcacctctcgtcccgaaaccgaccagagggcaaagtgttggagacagttggtgtgtttgaggtgccaaaacagaatggaaaatatgagaccgggcagcttttccttcatagcatttttggctaccgaggtgtcgtcctgtttccctggcaggccagactgtrtgaccgggatgtggcttctgcagctccagaaaaagcagagaaccctgctggccatggctccaaggaggtgaaaggcaaaactcacacttactatcaggtgctgattgatgctcgtgactgcccacatatatctcagagatctcagacagaagctgtgaccttcttggctaaccatgatgacagtcgggccctctatgccatcccaggcttggactatgtcagccatgaagacatcctcccctacacctccactgatcaggttcccatccaacatgaactctttgaaagatttcttctgtatgaccagacaaaagcacctccttttgtggctcgggagacgctaagggcctggcaagagaagaatcacccctggctggagctctccgatgttcatcgggaaacaactgagaacatacgtgtcactgtcatccccttctacatgggcatgagggaagcccagaattcccacgtgtactggtggcgctactgtatccgtttggagaaccttgacagtgatgtggtacagctccgggagcggcactggaggatattcagtctctctggcaccttggagacagtgcgaggccgaggggtagtgggcagggaaccagtgttatccaaggagcagcctgcgttccagtatagcagccacgtctcgctgcaggcttccagtgggcacatgtggggcacgttccgctttgaaagacctgatggctcccactttgatgttcggattcctcccttctccctggaaagcaataaagatgagaagacaccaccctcaggccttcactggtaggccagctgaggccccaagtgcccaggcttggtcaccgggaagaacaactctcatcccacaattgctgcagaactcttctctccccatcatgggccacagtgggtctcttaatttgattgtggggttctttttgtggggaggggtggtataacttttcttcagaagacccatgtgggacacctccaaggctggcctcctcataagccctgcctacaccatgttccagtaaacctctccaccaaggaactgtgttcagctgccacaggcctggaggagtttcctggcctgtcacgtgaggtttgatcagtaaaccagtgcasgyttggccaaaaaaaaaaaaaaaaaaaaaaaaaaaaaaaaaaaaaaaaaaaaaaaaaaaaaaactcga

SEQ ID NO: 194 - DNA, 1098 bp, Homo sapiens
  SITE (283): n equals a,t,g, or c
  SITE (301): n equals a,t,g, or c
  SITE (349): n equals a,t,g, or c
  SITE (438): n equals a,t,g, or c
agaccctgtctcaaataataataataataataatcttattttggagaataaagagacctstggatttgaggtgccatttgggtagaaagaaaagacgtttacaccgagaaatagtctgtgttgccctgaaggagcagagggatgcatcgctggaggtgacctacagttgaagaagactcattatgacagaccttgtccttcttccttgtggaaagtgtttcctctgctgctactgctcatgagactcttccccctccctgtcccagggaaccaaagggctttnctaccacaccctttcttngccccccgcctcccatgtctgctgtgcctttgtactcagcaattcttngtttgctcccattatcttccagccggatacagagtgaatagttaaccacacttaggtcaaataggatctaaatttttgttcctgctccngtgtaaagaggccagtgtttgtgtgttgcaagcagccttggaatagtaactcttctcatttgtttgggatctggccamcaagttccagaatgatacacggatcagtgcagaagttcatcaggctctcggaccttagggctgttggagaaggcttcagcagcagaactgatggtkawkgytcgtgttctccatcctcaactttctttgcttcgatcatacacaagaatacatttggaagggcaaaaaatgaacactgttgttcattgcagccgtgttttgtgacacagatgcacagtctgctgtgaagaccttctctcaagtggsatytgggagtccatgccagatcatggtgcttcatgagagactgacagctatcaggggttgtggcacttagtgaggactctcctcccccagtgtgtgctgatgacacatacacacctgacaatagcttgagtcttctctgttccttttactctgtagccaacatacacatgatttaaaaccctttctaaatatctatcatggttcatccttgtccaaatgcagagtcagagctatttgtacttcattattatttccaaggcgaatagttggctttctttttgcaaaaataattaaagtttttgtatgttgcaaaaaaaaaaaaaaaaaactacgtag

SEQ ID NO: 195 - DNA, 1001 bp, Homo sapiens
gaattcggcacgagatagcttgcatctcatcccagtaaaaccacttatttataacatatcaacgtattgacaaggttgaagagcaagattgttctgaggtgagatgcaaatttcaaaggggtgagcactaattgttccagtgattgtttatttattggctaggacataattactctctttgaggttacacatctgcctccaggttcctgtgtgcttgtgcccttgggatcaggccagggcagactgtgatcactgagattcaaactcccagartaatcagcaagagctttctagagaccaaggccaggcctgatccctgagggatgcatgagaaggcttggaatctcattctgctatggtggctctctcttgatcttcttggagtagcaaaaacagcaatgtgggcccaatggtgtggcctaaatgatcacaaaggtaaatgagtaaagggctcagcagatgagtaaggagccttgtcctgagaaattagcactgggctctgcattcagaaacatgtgataagcattgcccattgcacattgcctttattgtgtaaggacatgaaattccagttttgcatagctagtgatgaatacctgaagggaattgcagacatattttattttatttttaattgacagatggaattgtatatatttatcatgtacataatcatgctttaaaatatgtacattatggaatggctaaatcaaactaacctaggcattatctcatataattgtcatttttgtggcgagaagactaaaaatctaccctttcagcatttttaaagaatacaatgtgttttattaacaacagtcaccatttggtacactagatctcttgaacttcttcctcttatctaactgagatcttgtaacctttgataacagctcccaagcccttccccaaccactgctccacccgtggtaaccaccattctattctcaacttcctggtaatcaccattctagacacagggaagactctctaccctctga

SEQ ID NO: 196 - DNA, 1458 bp, Homo sapiens
ggcacgagataaactgaaataggtcatgcaaatataaaatattatttttaaattatttgtcataagaaacgatggtggccatattttgctttaataatggaaaaaatgtggttagcattctgtggaaggtggtcatcagatagtagacattttctaggatttatttctacctgcatatgtggaaatgtgtactactttagatttatttaatggcagctaactcagaggcatcaaaatgtgctaatggtgtaatatggcctttgtcttgctgttctgttttgtaggccttcaatcaagcagggcagggccgtacagtgaacttgtcctttgccagacgccagcgtctgcccctgaccccgtctccactctctgtgtcctggaggaggagccccttgatgcctaccctgattcaccttctgcgtgccttgtactgaactgggaagagccgtgcaataacggatctgaaatccttgcttacaccattgatctaggagacactagcattaccgtgggcaacaccaccatgcatgttatgaaagatctccttccagaaaccacctaccggtgagtgcaagggagtagaaatctgcatcagcacatcagcacttggggatctaagtaaacctctcggggaaaatgaccaagtggatgtcatctcccagctgtttctaagagcccagatgtccagagtattgtctcaccttgatccctcaggccagaagacctgtgaaaaagccacactggttcagggactcactggacggttttgtgtccactctaacctgcaccgtctctaccccagagtggactcaaatcctcaagtcagtcctctgaacattgaagtcagaaattataaaagggctttggcaatatgttagcccaagaatttggcttcttccagaaattgtgccgaccttaacagtggcttaaatgatggtaaaacttttaagatttctaaaaggatggcattggagatacgttgacttttattaaacaacctatagttgtttaatgacttctaaaaaaatatctggagctcaggggttcaactgagggaacacatgttgagaatcattgtttactaattaaatgccaggtaaccgttgaaattatcaaaaacatcttccacgtaccagaaagcactcagaggatagttctgttatggagaagatgaaatggtttagtagtgtaggaactatggaaaggtgagcttagatttggatagtaaaacctcaagaccctatttaaaaagtattttatgaatgcagcataaataatttaattcagtgttaaatgccaaggctagtatattgagctgaatgtgaaaagaaactcacattgggagaatgccaccttttccttataagatagctttgaagataccattttagacagatggaaattgaatagctttagaaaaggcaaatgtttgatcttggggaaaaaaaaaaaaaaaaa

SEQ ID NO: 197 - DNA, 1282 bp, Homo sapiens
  SITE (675): n equals a,t,g, or c
  SITE (1195): n equals a,t,g, or c
gaaaaaaaaaagtatgacccagtagctaggcacctgtggccccgccaagttgacacataaaattaactgtcacagtatcatcttagaagtgaaagaagcccctttatcctgcagtgcccctctaccaccacctactgacaaagaacatggtgctatctggcatgggagaaatgttcagtttgctatggcttgtatgtgtcccctcaaattcaagtgttgccaatgtgacagcatcaagaggtggggtctttaagagatcactaggccatgagggattctcttaggactgggatgaaggcccataataaaagaggtttcagggagcatcctgctagcttgccttctgtatgtgagaacacagcaagaaagccctagtcaacaagtgccagctccttgatcttagacttcccatcctccagaactgtgagaaatacatttctgttccttacaaattacccagtctcctgtattctgttatagcagcacaaaatgaagataccatacctgaacacctgaacattcttcacaaggtagtaaatgcactgctttattctggtctcagtattgtgtgcttaataaggaaatgagaaagggtggatcagggcataggatgaacaagttactgctagacctctcacaatgccactaatggataagattgtattttcatcattncttgtctcttcggaagctaacaccatgctataataggcactaaatagatgtctaaaaacaccttaagtatttgtctagaaatctggtgcattgtccagaaagaaccaaaattcmaaataatttcaaagggcctaaagcactakttaatcmaaattcattagtttttaatggtactaccactctcaaatttaaaatgtcatcttacgttcctcttcctcgcattggatttattgctaaaacctggtaaacactttaatccytttcaattccattaccactgctcttgtccagaattactcgcagactaatagtcacctgacttctccccctgcatcccgatttgctgtctaattctggttacaaataagtaactgccaaactaatctttctaaaaagcaagactgatctcgtcactcctttgctcaacaatgtaaaagctcccattgtctcccaaataaaaccagctttccactgtgtatacaatacatccatgatctgtatccagcatcattttgtattngctcactttatacaccaccccccatgccacatcaaattaaattatcctgataaatgcaactgcaaaaaaaaaaaaaaaaaaactcga

SEQ ID NO: 198 - DNA, 951 bp, Homo sapiens
atttcggaacgaggactgaagtgggagcggcggcagggtagaagacagaagggggatctatgtggtaactaaagaatgtttctgttttgttaattattgtgtgtgtgtggttttattgtttgcttaagagaatcaaaaactgaaaaaaatgagaatacaggaaatggctcttgtttatttttttgctgtgtttacagcttgttaatgctctactgtctttgtttcaagagagatttgttcactgcccagctcgttttgtgtcctgagccctatgcccagcccaccttataaatcatgcctgtttagatgtttgattttgttctgtttgctattgttatcttaaaggtgtataactctgacatgccagacatcaaattaagctcaaattaagctctcgtttaaatgtttaaacacctaatttatattctaattgatcccagccactgatgcatgtactttagctacttctgctaaataagcatattaattttccacatcaggccatcagatcttgagaaccaacagttatctagaattccgtgtctactaatgtttcacctgcatgcagccttcattaattttgtagcaaaatataaagtgatcattatgtagtttctggattaaaaaaatttgtgtgtgaagttgctttgtaaagtgcatgtggaattaatgggacagtgtgccctttgtgttagatgttagagcaaaagaaagggcttatagtgttagtattggagcactttgaagatagatattttcagaaaagatgtaggatttaaaagttaaattttaaattttagaaaaagatatgatggcaattggaaatagtcacaatgaagttcttcatccagtaggtgtttaacagtgttattttgccactggtaatgtgtaaactgtgagtgatttacaataaatgattatgaattcaaaaaaaaaaaaaaaaaaactcga

SEQ ID NO: 199 - DNA, 1740 bp, Homo sapiens
  SITE (1310): n equals a,t,g, or c
  SITE (1736): n equals a,t,g, or c
  SITE (1737): n equals a,t,g, or c
ttattataataatgatgatgattccaaggaaaaaacctacagcgaatgttccatttctaccccgcacgcagacactctccctaacactgataacctgagcccccagcactggacggaagaatgctggcgtctccgtgtgtactggttcagggttctggccccagccttgtcaggaccccctggtgtccagagcccccacccctcccgcaacaagcagctgatgccccagtgattctctatacatttttcacctcggccaatatgtccaggaaaactgcttacttctcttttcttgcctggagccttcattgttcacccttacgttgcaatataggaattaatgctacaaaataaaagtaaagcttacctgaaaagtgcatagtttggggcaatggtatctacatctcccactgtgggaaaaccagcaaagcatcaaaactctcaattctcctgttaccraatgcagatctgaattataagatgtttatgtttgaccattgtttcaacaatgggattttgttacgaattatccctttaactgaaaccctcagttttactgtttacattattaggaaaacagggatatcttttgaatctaaaaatttgatgtacagcatgtgatttttgaagtttacatgtaaagtcacagtataggtgaaataacgtttgtcatattttgagacgtatcctgcagccatgtttttacgtgagtgttttagtcaaagtacatggtagacagtctttcacaataaaaggaaaaggattttttttcctccaaatgtacatttatcaacctaatgattgatttttttaaaaagagatttcgccccagtctggtttatgaaagttcattgccctaaactgtgctgattgtttttaatcaagttataaatttccaacctagatcatgtatctaccaactctcctgcattttccaaaaggcattgagcttaaatattagtcttgcttagagtaggttatccacttacatgctgcgctaaagccatgcctttgaaactccttgtttaaaacatgatatgatttttgtgggcagtttcagaaaagaaaacaaacaaacaaaaatcgaccctttaattattacttgcaactcaacagatctccctgccgtactgccttttccaggaactttacttcagggctgtccagattgcagttgtgccccgtgtatgtggatctagttcacagagtctttggaagccagcagtcgtgccctccgtatactgtccactcattttatgtagatttggtatcctcagcagccagtgttaacaccactgtcacgtagttancagattcatcttttatgtatttaaagtaatccatactatgatttggtttttccctgcaccattaattctggcatcagatcagtttttgtgttgtgaagttctactgtggtttgacccaagaccacaaccatgagaccctgaagtaaagataaggtacacatacattatttgagtaactgtttccttgggggccaatctgtgtatgcttttagaagtttacagaatgcttttatttttgtctataacaaacagtctgtcatttatttctgttgataaaccatttggacagagtgaggacgtttgccctgttatctcctagtgctaacaatacactccagtcatgagccgggctttacaaataaagcacttttgatgactcamaaaaaaaaaaaaaaaaamcycgggggggggccggtaacccatttnnccc

SEQ ID NO: 200 - DNA, 1707 bp, Homo sapiens
gcttatagaagggagaggagcgaacatggcagcgcgttggcggttttggtgtgtctctgtgaccatggtggtggcgctgctcatcgtttgcgacgttccctcagcctctgcccaaagaaagaaggagatggtgttatctgaaaaggttagtcagctgatggaatggactaacaaaagacctgtaataagaatgaatggagacaagttccgtcgccttgtgaaagccccaccgagaaattactccgttatcgtcatgttcactgctctccaactgcatagacagtgtgtcgtttgcaagcaagctgatgaagaattccagatcctggcaaactcctggcgatactccagtgcattcaccaacaggatattttttgccatggtggattttgatgaaggctctgatgtatttcagatgctaaacatgaattcagctccaactttcatcaactttcctgcaaaagggaaacccaaacggggtgatacatatgagttacaggtgcggggtttttcagctgagcagattgcccggtggatcgccgacagaactgatgtcaatattagagtgattagacccccaaattatgctggtccccttatgttgggattgcttttggctgttattggtggacttgtgtatcttcgaagagtaatatggaatttctctttaataaaactggatgggcttttgcagctttgtgttttgtgcttgctatgacatctggtcaaatgtggaaccatataagaggaccaccatatgcccataagaatccccacacgggacatgtgaattatatccatggaagcagtcaagcccagtttgtagctgaaacacacattgttcttctgtttaatggtggagttaccttaggaatggtgcttttatgtgaagctgctacctctgacatggatattggaaagcgaaagataatgtgtgtggctggtattggacttgttgtattattcttcagttggatgctctctatttttagatctaaatatcatggctacccatacagctttctgatgagttaaaaaggtcccagagatatatagacactggagtactggaaattgaaaaacgaaaatcgtgtgtgtttgaaaagaagaatgcaacttgtatattttgtattacctctttttttcaagtgatttaaatagttaatcatttaaccaaagaagatgtgtagtgccttaacaagcaatcctctgtcaaaatctgaggtatttgaaaataattatcctcttaaccttctcttcccagtgaactttatggaacatttaatttagtacaattaagtatattataaaaattgtaaaactactactttgttttagttagaacaaagctcaaaactactttagttaacttggtcatctgattttatattgccttatccaaagatggggaaagtaagtcctgaccaggtgttcccacatatgcctgttacagataactacattaggaattcattcttagcttcttcatctttgtgtggatgtgtatactttacgcatctttccttttgagtagagaaattatgtgtgtcatgtggtcttctgaaaatggaacaccattcttcagagcacacgtctagccctcagcaagacagttgtttctcctcctccttgcatatttcctactgaaatacagtgctgtctatgattgtttttgttttgttgttttttygagatcacgytactgggctc

SEQ ID NO: 201 - DNA, 779 bp, Homo sapiens
ctgtccccagtgtttccaggtaatgacttggcactccagagaaagtttcatrctgttgcgtgtggtggctccaagccaagcacctggcatgcaggtcagcccttcccagcgggcgtggcgtcgtcctcttcacagatgccacgttgcagccccaaggcctcaccattttgcgttttttagaaacccattttcttggtcatttataaagctgctttatagatatctttgatcctggcatgccttggtttcctctcccttccctctttccaatcctggtttcctaacctcctcttgtagtaattctcaactcaactcaaagtcccaagaatttggaatggtaggatgctgtgcggggagctcgaggctgaggcataatcactgcttcggttctgctcatcaggggacacgctcccttactcatggcagccatgtttgattgtcacagagccccccgaatactctgtctatagtgacacactgtaggtgtcataaattttaagaaacctgcttttaagtactatttataggtttttctgttatacttgcaacctagttttaaaatacatgaggattttatgaaagctttatacagacatttataggaaactcattctttgattttaggtgccatttaaattgataacacttactttataaaaagatgctttttgtctggatagagccttatagtttaaaatatcttcatatattgccatttgatcaaataaatttcttacttagaaaaaaaaaaaaaaaaaaaaaaaaaaaaaaaaactcga

SEQ ID NO: 202 - DNA, 1617 bp, Homo sapiens
ggcacagctttctgtctcttcctcgctccctctctttctctcctccctctgccttcccagtgcataaagtctctgtcgctcccggaacttgttggcaatgcctattttttggctttcccccgcgttctctaaactaactatttaaaggtctgcggtcgcaaatggtttgactaaacgtaggatgggacttaagttgaacggcagatatatttcactgatcctcgcggtgcaaatagcgtatctggtgcaggccgtgagagcagcgggcaagtgcgatgcggtcttcaagggcttttcggactgtttgctcaagctgggcgacacatggccaactacccgcagcctgggacgacaagacgaacatcaagaccgtgtgcacatactgggaggatttccacagctgcacggtcacagcccttacggattgccaggaaggggcgaaagatatgtgggataaactgagaaaagaatccaaaaacctcaacatccaaggcagcttattcgaactctgcggcagcggcaacggggcggcggggtccctgctcccggcgttcccggtgctcctggtgtctctctcggcagctttagcgacctggctttccttctgagcgtggggccagctccccccgcgcgcccacccacactcactccatgctcccggaaatcgagaggaagatccattagttctttggggacgttgtgattctctgtgatgctgaaaacactcatataggattgtgggaaatcctgattctcttttttatttcgtttgatttcttgtgttttatttgccaaatgttaccaatcagtgagcaagcaagcacagccaaaatcggacctcagctttagtccgtcttcacacacaaataagaaaacggcaaacccaccccattttttaattttattattattaattttttttgttggcaaaagaatctcaggaacggccctgggcacctactatattaatcatgctagtaacatgaaaaatgatgggctcctcctaataggaaggcgaggagaggagaaggccaggggaatgaattcaagagagatgtccacggacgaaacatacggtgaataattcacgctcacgtcgttcttccacagtatcttgttttgatcatttccactgcacatttctcctcaagaaaagcgaaaggacagactgttggctttgtgtttggaggataggagggagagagggaaggggctgaggaaatctctggggtaagagtaaaggcttccagaagacatgctgctatggtcactgaggggttagctttatctgctgttgttgatgcatccgtccaagttcactgcctttattttccctcctccctcttgttttagctgttacacacacagtaatacctgaatatccaacggtatagatcacaagggggggatgttaaatgttaatctaaaatatagctaaaaaaagattttgacataaaagagccttgattttaaaaaaaaaagagagagagatgtaatttaaaaagtttattataaattaaattcagcaaaaaaagatttgctacaaagtatagagaagtataaaataaaagttattgtttgaaaaaaaaaaaaaaaaaawctcgaccgcaagggaat

SEQ ID NO: 203 - DNA, 1974 bp, Homo sapiens
gaattcggcacgaggctgagggagctgcagcgcagcagagtatctgacggcgccaggttgcgtaggtgcggcacgaggagttttcccggcagcgaggaggtcctgagcagcatggcccggaggagcgccttccctgccgccgcgctctggctctggagcatcctcctgtgcctgctggcactgcgggcggaggccgggccgccgcaggaggagagcctgtacctatggatcgatgctcaccaggcaagagtactcataggatttgaagaagatatcctgattgtttcagaggggaaaatggcaccttttacacatgatttcagaaaagcgcaacagagaatgccagctattcctgtcaatatccattccatgaattttacctggcaagctgcagggcaggcagaatacttctatgaattcctgtccttgcgctccctggataaaggcatcatggcagatccaaccgtcaatgtccctctgctgggaacagtgcctcacaaggcatcagttgttcaagttggtttcccatgtcttggaaaacaggatggggtggcagcatttgaagtggatgtgattgttatgaattctgaaggcaacaccattctccaaacacctcaaaatgctatcttctttaaaacatgtcaacaagctgagtgcccaggcgggtgccgaaatggaggcttttgtaatgaaagacgcatctgcgagtgtcctgatgggttccacggacctcactgtgagaaagccctttgtaccccacgatgtatgaatggtggactttgtgtgactcctggtttctgcatctgcccacctggattctatggagtgaactgtgacaaagcaaactgctcaaccacctgctttaatggagggacctgtttctaccctggaaaatgtatttsccctccaggactagagggagagcagtgtgaaatcagcaaatgcccacaaccctgtcgaaatggaggtaaatgcattggtaaaagcaaatgtaagtkttccaaaggttaccagggagacctctgttcaaagcctgtctgcgagcctggctgtggtgcacatggaacctgccatgaacccaacaaatgccaatgtcaagaaggttggcatggaagacactgcaataaaaggtacgaagccagcctcatacatgccctgaggccagcaggcgcccagctcaggcagcacacgccttcacttaaaaaggccgaggagcggcgggatccacctgaatccaattacatctggtgaactccgacatctgaaacgttttaagttacaccaagttcatagcctttgttaacctttcatgtgttgaatgttcaaataatgttcattacacttaagaatactggcctgaattttattagcttcattataaatcactgagctgatatttactcttccttttaagttttctaagtacgtctgtagcatgatggtatagattttcttgtttcagtgctttgggacagattttatattatgtcaattgatcaggttaaaattttcagtgtgtagttggcagatattttcaaaattacaatgcatttatggtgtctgggggcaggggaacatcagaaaggttaaattgggcaaaaatgcgtaagtcacaagaatttggatggtgcagttaatgttgaagttacagcatttcagattttattgtcagatatttagatgtttgttacatttttaaaaattgctcttaatttttaaactctcaatacaatatattttgaccttaccattattccagagattcagtattaaaaaaaaaaaaattacactgtggtagtggcatttaaacaatataatatattctaaacacaatgaaatagggaatataatgtatgaactttttgcattggcttgaagcaatataatatattgtaaacaaaacacagctcttacctaataaacattttatactgtttgtatgtataaaataaaggtgctgctttagttttctga

SEQ ID NO: 204 - DNA, 1057 bp, Homo sapiens
  SITE (31): n equals a,t,g, or c
  SITE (50): n equals a,t,g, or c
  SITE (132): n equals a,t,g, or c
  SITE (751): n equals a,t,g, or c
cggccttccggggcaaccgttcgtcccaacncgggaaagggtcctggagncgggaactaggagcctcggaagtccaagggcggagcgccctttgctaataagccaatcagaacgtgagacgctccggtgggncggtgccgtcgagcgcggggtggagtctgggtgacttggctggcgggatcaagtgcagctgcttcaggctgaggtggcagatagtgagcgctggtggcggagttaaagtyaaagcaggagagtaatwatgaatagcgcagcgggattctcacacctagaccgtcgcgagcgggttctcaagttaggggagagtttcgagaagcagccgcgctgcgcttccacactgtgcgctatgacttcaaacctgcttctattgacacttcttctgaaggataccttgagkttggcgaagktgaacagktgaccatwactctgccmaatatagaaagttgaaggaagcagtaaaattcagtatcgtaaagaacaacagcaacaacaatgtggaattcasccaggactcccaatcttgtaaaacattctccatctgaagataagatgtccccagcatctccaatagatgatatcgaaagagaactgaaggcagaagctagtctaatggaccagatgagtagttgtgatagttcatcagattccaaaagttcatcatcttcaagtagtgaggatagttctagtgactcagaagatgaagattgcaaatcctctacttctgatacagggnaattgtgtctcaggacatcctaccatgacacagtacaggattcctgatatagatgccagtcataatagatttcgagacaacagtggccttctgatgaatactttaagaaatgatttgcagctgagtgaatcaggaagtgacagtgatgactgaagaaatatttagctataaataaaaatttatacagcatgtataatttattttgtattaacaataaaaattcctaagactgagggaaatatgtcttaacttttgatgataaaagaaattaaatttgattcagaaaaaaaaaaaaaaaaaactcga

SEQ ID NO: 205 - DNA, 721 bp, Homo sapiens
  SITE (264): n equals a,t,g, or c
  SITE (340): n equals a,t,g, or c
gaattcggcacgagtcatccctctccctctttcactcccttactcttactctgttttttgtgctccagacagacagaccctacctcttttgcttcttttttgtttgtttgttttgagatggagtgtcgctcttgttgcccaggctggagtgcagtggcgcaatctcggctcaccacaacctctgcctcccgggttcaagcaattctcctgcctcagcctcccgagaagctggggattacaggcatgcgccaccacacccagctnaattttatatttttagtagagatggtgtttctccatgttggtcaggctggcctcaaactcccaacctcaggtgatnccgcctgctttggcctccccaaagtgctgggattacaggcgtgagccactgcgcccagcctcttttgctcctttatactcattaactcacgcctgtaatccctgttttgggaggccaaagtgagaaggttgcttgaggccaagagtttgagactagcctgggcaacacagcaagatgccatctttataataaaaataaaaataaaaatcaattagctgggcatggtggaacgcacctgtagtcccagccaattgagaggctgaagtgggaggatcattgagcccaggagttgaggttgcagtgagccatgatcatgtcactacactcagcctgggcaatagagggacatgttgtctctaaaaaaaaaaaaaaaaaactcga

SEQ ID NO: 206 - DNA, 2465 bp, Homo sapiens
ccaccatttatccaactgaagaggagttacaggcagttcagaaaattgtttctattactgaacgtgctttaaaactcgtttcagacagtttgtctgaacatgagaagaacaagaacaaagagggagatgataagaaagagggaggtaaagacagagctttgaaaggagttttgcgagtgggagtattggcaaaaggattacttctccgaggagatagaaatgtcaaccttgttttgctgtgctcagagaaaccttcaaagacattattaagccgtattgcagaaaacctacccaaacagcttgctgttataagccctgagaagtatgacataaaatgtgctgtatctgaagcggcaataattttgaattcatgtgtggaacccaaaatgcaagtcactatcacactgacatctccaattattcgagaagagaacatgagggaaggagatgtaacctcgggtatggtgaaagacccaccggacgtcttggacaggcaaaaatgccttgacgctctggctgctctacgccacgctaagtggttccaggctagagctaatggtctgcagtcctgtgtgattatcatacgcattcttcgagacctctgtcagcgagttccaacttggtctgattttccaagctgggctatggagttactagtagagaaagcaatcagcagtgcttctagccctcagagccctggggatgcactgagaagagtttttgaatgcatttcttcagggattattcttaaaggtagtcctggacttctggatccttgtgaaaaggatccctttgataccttggcaacaatgactgaccagcagcgtgaagacatcacatccagtgcacagtttgcattgagactccttgcattccgccagatacacaaagttctaggcatggatccattaccgcaaatgagccaacgttttaacatccacaacaacaggaaacgaagaagagatagtgatggagttgatggatttgaagctgaggggaaaaaagacaaaaaagattatgataacttttaaaaagtgtctgtaaatcttcagtgttaaaaaaacagatgcccatttgttggctgtttttcattcataataatgtctacattgaaaaatttatcaagaatttaaaggatttcatggaagaaccaagtttttctatgatattaaaaaatgtacagtgttaggtattatttgaatggaaagacacccaaaaaaaaaaatgtgctccgactagggggaaaacagtagttccgattttttcccattatttttattttattttctggttgccctagcttccccccctatttttgtgtcttttattaactagtgcattgtcttattaaatcttcactgtatttaatgcaggatgtgtgcttcagttgctctgtgtattttgatattttaatttagaggttttgtttgctttttgacactagttgtaagttactttgttatagatggtatcctttaccccttcttaatattttacagcagtacgtttttttgtaacgtgagactgcagagtttgtttttctatatgtgaaggattacaacacaaaaagttatcctgccattcgagtgctcagaactgaatgtttctgcagatcttgtggcatttgtctctagtgtgatatataaaggtgtaattaagacagagttctgttaatctaatcaagtttgctgttagttgtgcattagcagtataaaagctaatatatactatatggtcttgcaacagttttaaagcctctgcataattgataataaaaatgcatgacattcttgtttttaatagacttttaaaatcataattttaggtttaacacgtagatctttgtacagttgactttttgacatagcaaggccaaaaataactttctgaatatttttttcttgtgtataagtggaaagggcatttttcacatataagtgggctaaccaatattttcaaaagaacttcatcattgtacaactaacaacagtaactagcccttaattatggtgacagttccttattggtgtgtgtgagattactctagcaactattacagtataacacagatgatcttctccacacaccccatcacccagataatttacagttctgttaacagtgaggttgataaagtattactgataaaaaattatctaaggaaaaaaacagaaaattatttggtgtggccatcttacctgcttatgtctcctacacaaagctaaatattctagcagtgatgtaatgaaaaattacatcttactgttgatatatgtatgctctggtacacagatgtcattttgttgtcacagcactacagtgaaatacacaaaaaatgaaattcatataatgacttaaatgtattatatgttagaattgacaacataaactacttttgctttgaaatgatgtatgcttcagtaaaatcatattcaaatttaaaaaaaaaaaaaaaaaaaactcga

SEQ ID NO: 207 - DNA, 1480 bp, Homo sapiens
gaattcggcacgagctcaagctggcaggtggtcgggggagcggccggagaggagctgccgggagttcgtgccctgcaggacatgacaccagtggcatatcacggccatggggtctcagcattccgctgctgctcgcccctcctcctgcaggcgaaagcaagaagatgacagggacggtttgctggctgaacgagagcaggaagaagccattgctcagttcccatatgtggaattcaccgggagagatagcatcacctgtctcacgtgccaggggacaggctacattccaacagagcaagtaaatgagttggtggctttgatcccacacagtgatcagagattgcgccctcagcgaactaagcaatatgtcctcctgtccatcctgctttgtctcctggcatctggtttggtggttttcttcctgtttccgcattcagtccttgtggatgatgacggcatcaaagtggtgaaagtcacatttaataagcaagactcccttgtaattctcaccatcatggccaccctgaaaatcaggaactccaacttctacacggtggcagtgaccagcctgtccagccagattcagtacatgaacacagtggtgaattttaccgggaaggccgagatgggaggaccgttttcctatgtgtacttcttctgcacggtacctgagatcctggtgcacaacatagtgatcttcatgcgaacttcagtgaagatttcatacattggcctcatgacccagagctccttggagacacatcactatgtggattgtggaggaaattccacagctatttaacaactgctattggttcttccacacagcgcctgtagaagagagcacagcatatgttcccaaggcctgagttctggacctacccccacgtggtgtaagcagaggaggaattggttcacttaactcccagcaaacatcctcctgccacttaggaggaaacacctccctatggtaccatttatgtttctcagaaccagcagaatcagtgcctagcctgtgcccagcaaatagttggcactcaataaagatttgcagaatttaatacagatcttttcagctgttcttagggcattataaatggaaatcataacgtggttctaggttatcaaaccatggagtgatgtggagctaggattgtgagtgacctgcaggccattatcagtgcctcatctgtgcagaagtcgcagcagagagggaccatccaaatacctaagagaaaacagacctagtcaggatatgaatttgtttcagctgttcccaaaggcctgggagctttttgaaaagaaagaaaaaagtgtgttggctttttttttttttagaaagttagaattgtttttaccaagagtctatgtggggcttgattcacccttcatccattggctggaacatggattggggatttgatagaaaaataaaccctgcttttgattcaaaaaaaaaaaaaaaawaaaaaaaactcga

SEQ ID NO: 208 - DNA, 872 bp, Homo sapiens
  SITE (422): n equals a,t,g, or c
  SITE (847): n equals a,t,g, or c
  SITE (856): n equals a,t,g, or c
  SITE (872): n equals a,t,g, or c
cagtatttccctcagtactgtaagcaaaagtggtatgtttttctttctttatgtctactctgtcctctgtggccttctggtgtacccctctcttcctagccattcagtctctctagtcacctccctagtagctagtgctctctaagtttttatttaattagaacaactccatttccatttcaaggtaggtcaatggggggaaaagcctcatgatttaaactgaagttaacaacacagcttttaaaatgaaaactcatactccaacttctaaagtatatttgagctgatttgtttccaaaacaaagatatgctgtacctaaaactgctaaaacaaaaatataaagacaaggactaggtgattaaggggagagaaaaatcatytcttttccaggaaacctttgctaaaataagcaaaacttgantctatgcttcatggaaactgacacaaagaaaagaaactgatggattgcacaggccttgttatagaaatagatctataaaaagatctgtccacaggaaatatacaccttctcctggttctgaacttcaatggggatttgtcacctaggtctccatctataggaataccttcacatacctatctattcatgcacatattctgaaaacaggtacatacaaaattacaacaaaggaaaaaaattctattgaacacttaaaaatagaaacaggccaggcacggtggctcatgctgtaatcccaacaatttgggaggctgaggctggtggatcacctgaggtcaggagtgtgagaccagcttggccaacatggtgaaaccccgtcactactaaaaatacaaaaaaaattagcctgtgtggtggcacactcntacaatccnggctgactcgggaaan

SEQ ID NO: 209 - DNA, 1779 bp, Homo sapiens
aattgccaagactgcacaaaattacagtgctaatgtatatggttgcagttcacataaagacaaaagcatctgttatgaaatgagtagtaatattgggtggttgatttgttcttagcagacttggcttcatwttggtcttgagataaaatggccagcataaatgctgtttatattcacgttttcctaggtgtgtgtgtgcaggccacagcagcatgcccttggtgtagtcagtgccgaaasgggtctgttccttcttgagcctgcctgcagggatggtctccttttaaagcaggttgtgtgcagcattcagtacactgaaggtaagctaaaccatcaacatctctggtgttttaagatgttattttattggaacaactgacaaatgagggatgttagctttgtggcagaattccctgcatgtgtgataactgatcttgttttattttttggcattgcaactgtggcatagttacaatttctgtttgktcatcacatttaaaattggragagaacgcgcttgakggatagagcgccttcagkgtactgtttcttattaactttactttttttaaatcaacttgctatagactttatatacattttgttaaatatagttcctagtgacatagaaacgatgcgtagttttcatttactaattacaaatgttgaggcctaattctgaaagtcctcatatttaaaggctagacaacgtaatgaaatttttaactatttgtatgtcattttgaaagtgtactgctttatggtaaaagtgtttttcatttgttcattgttttcattatttgtgatcatgttgtctttcaatacaggcataaaccttccactcttgaacaaagcagctgctttttaaaagcggtaattgcttctttaccttttatttcttttgtaaatgaagcttttctttaagaatgtgactttaaagtgttgtctattgcataaaacagttgacactcacttattgtaaagtgaagattgttctactgcatgtgaagtggaccatgcagatttctgtatgttctcagtatgcatcactagataataaagtcttttgtgaacaaggcatttgtagccatttttaaaagtttttgtcttcagtgctggtaagtcaggtaaaccataaatagttaaaagcaaccttttgtttttttcctgaaagtttttaattgaaagtattattagttaaagatgtaaacctagccaaaattaccagtttattaataattaggatcctaattatttcaaaaaatcctacaaatattgtcagctttcagtgtagtgagattattcctgtaggttatggggtataattcaggatttaactaatgtttctgctattttctcacttttccttttgatggtgcggaaagagaaaaaggaaaacggggcacaggccattcgacgccttctccaaggggtctgatttgctgagacaccagcttcaccttcttaacaaggcacctaattacaacaagcatgcacattttggtgcattcaagaatggaaaatcagaatagcagcattgattcttctggtgcagctcagtggaagatgatgacaaccagaagacatgagctaagggtaagggactgttctgaagaacctttccatttagtgatcaagatatggaagctgatttctgaaaatgctcagtgtgtactctaattatttatggtaccatttgaattgtaacttgcattttagcagtgcatgtttctaattgacttactgggaaactgaataaaatatgcctcttattatcaa

SEQ ID NO: 210 - DNA, 2110 bp, Homo sapiens
  SITE (750): n equals a,t,g, or c
gcggccgctgcagcccggagctgagctagccgtccgagccgagccgtccgagccggggaagccggcgcgtgctgccgctcgtggcggccagaggagaggagaggcagcagcatggcgagtgtcctgtcccgacgccttggaaagcggtccctcctgggagcccgggtgttgggacccagtgcctcggaggggcctcggctgccccaccctcggagccactgctagaaggggccgctccccagcctttcaccacctctgatgacaccccctgccaggagcagcccaaggaagtccttaaggctcccagcacctcgggccttcagcaggtggcctttmagcctgggcagaaggtttatgtgtggtacgggggtcaagagtgcacaggactggtggwgcagcacagctggatggagggtcaggtgaccgtctggctgctggagcagaagctgcaggtctgctgcagggtggaggaggtgtggctggcagagctgcagggcccctgtccccaggcaccacccctggagcccggagcccaggccctggcctacaggcccgtctccaggaacatcgatgtcccaaagaggaagtcggacgcatggaaatggatgagatgatggcggccatggtgctgacgtccctgtcctgcagccctgttgtacagagtcctcccgggaccgaggccaacttctctgcttcccgtgcggcctgcgacccatggaaggagagtggtgacatctcggacagcggcancagcactaccagcggtcactggagtgggagcagtggtgtctccaccccctcgcccccccacccccaggccagccccaagtatttgggggatgcttttggttctccccaaactgatcatggctttgagaccgatcctgaccctttcctgctggacgaaccagctccacgaaaaagaaagaactctgtgaaggtgatgtacaagtgcctgtggccaaactgtggcaaagttctgcgctccattgtgggcatcaaacgacacgtcaaagccctccatctgggggacacagtggactctgatcagttcaagcgggaggaggatttctactacacagaggtgcagctgaaggaggaatctgctgctgctgctgctgctgctgccgcagacccccagtccctgggactcccacctccgagccagctcccacccccagcatgactggcctgcctctgtctgctcttccaccacctctgcacaaagcccagtcctccggcccagaacatcctggcccggagtcctccctgccctcaggggctctcagcaagtcagctcctgggtccttctggcacattcaggcagatcatgcataccaggctctgccatccttccagatcccagtctcaccacacatctacaccagtgtcagctgggctgctgccccctccgccgcctgctctctmtctccggtccggagccggtcgctaagcttcagcgaagccccagcagccagcacctgcgatgaaatctcatctgatcgtcacttctccaccccgggcccagagtggtgccaggaaagcccgaggggaggctaagaagtgccgcaagtgtatggcatcgagcaccgggaccagtggtgcacggcctgccggtggaagaaggcctgccagcgctttctggactgagctgtgctgcaggttctactctgttcctggccctgccggcagccactgacaagaggccagtgtgtcaccagccctcagcagaaaccgaaagagaaagaacggaaacacggagtttgggctctgttggctaaggtgtaacacttaaagcaattttctcccattgtgcgaacattttattttttaaaaaaaagaaacaaaaatatttttccccctaaaataggagagagccaaaactgaccaaggctattcagcagtgaaccagtgaccaaagaattaattaccctccgtttcccacatccccactctctaggggattagcttgtgcgtgtcaaaagaaggaacagctcgttctgcttcctgctgagtcggtgaattctttgctttctaaactcttccagaaaggactgtgagcaagatgaatttacttttcttaaaaaaaaaaaaaaaaaaaaaaactcga

SEQ ID NO: 211 - DNA, 938 bp, Homo sapiens
  SITE (200): n equals a,t,g, or c
ggcacaggaaaaaaaagaaaaaagaaaaaagaaaaaagtttttgtacccacagattagcattttcttgatgtttgaaaaaagtttaagctatgtcctaatttaaaaatgagcacaaactacttaacagatgtctgttccctcttctcttacttaaattatctttattttcaccatcacctcccagtgccgaacacctganctctgtgttttgtggttggatcctgggttgccaagttcctatttggtcagtccctggcctgtggggcggtctcaggaagtggcatgctcttcamgraggatcgttcatytccagtataaccawtttgttaataatagttgataattcccagcttttaccagatgarttttgacttatttttcctcctttgacctgttcaaagctaacatatctcggtcagttcggagagggtgggggatttgagaatgtgaggaggagtggggttagaatgggtttgcctatctgggcaaggaaagagttcctagtcgattgggcacaatgacaaaatgattccatggatagaatcgtcccatgttgctggaacacctcacgtgttgtgaacgccttaaattcctgccatcccttctctgattccccacctccctgtagtttccacaggatttatctctctgtacccccgtcctccaactctactctgtcagcctctcctccatcccttacttcccttctaaattccaggagatgacctcactttgcaaagcaaattggagccaccaaattgtagctctcctcggtggaaactgcatctgtgctcatccctgcaccttcttgcagaaagccgccccctcaggccaagatgagtgcctggcccccatgggagactcagacactttgaccccttgtgacttcagcatctccctctttaaagattctctcccaacattcagtcgtgctcga

SEQ ID NO: 212 - DNA, 1551 bp, Homo sapiens
  SITE (420): n equals a,t,g, or c
  SITE (1017): n equals a,t,g, or c
  SITE (1408): n equals a,t,g, or c
  SITE (1423): n equals a,t,g, or c
aggctggactaagcatagagaaccaggagagaaagaaagatttaagagactgagtaatattttttgacagatcatttaagaaactgagtaattttttttttctccaaaagggcatgggttttttttttgttttgttttttctctatttggcactttctagggattggtctataaattttttgaaagatcataggataaatttctttgtagcaacttcctattttagtgtttatgttaggggarccccargtgtccctgctgatacgccattagggccacttctcagcctctggctacatcataatgcttttttttctatcttgccaaagtttccmgaaaattkakgttttctaattttaaaaaaattggttgtggagatgggatgggacctctttataagccctgaaaataagtgatttnttttaagtgctattctgctataaacctgattctcacttttttctgtagacaacagttttttataatatatctattttgtgtggacattatttccttttaaccaatactgaaattccatagtgtawactttctccacattttctttgattaatacttycttaaaatagacacttggattggcaccagctgtcaccaataaagctgccctgaacattgtcaatcaatcctgttaaccaatttgagaatttttctggaatgcttagttagggatgaaattgctgggttataggtatgagtatgcttgatatacttttctccagaatgtctacacctgtgtgtacaccacatctccagagataggggaatcttatgtccctgctaactgctctcgttatttaattttctgacatttgccgccgccgccgccccctgcccccaacacacacatggtataaagtggtagtttcttgttttaaattgaacttttgaatgatttgaatttgggcatttctttgtatcctgagttattttggtttcccgttatgtgaatatccttttcctatgctttaactacttttctaatttgtcccttttttnggttatcaaattccaggccattgtctattccatcgtcacttttgggtattggaaacatctttccattctgtagcctgtctgttgaacataaatcttgatttttatgtaatcagatttttctccttacggttatgttcttggaattttatttaagaaatctttttctatcctgagaccacaaaaatgtccccaccattttcttctgtttcatagttttgccttgtatgtttaatcctttaaggcatgtgtagttcattttatatggtgtgaaatagttcttattcatttattcaacacatattggtggagtgcctgctgatggtagtactcttcagagtactttgtatatatttgtgaacacatattcttgccctggaagcttatgttgtcnttcaaggtagatccntactcggtttccacctgttttcttcagccctcaggatgaattccacaattttacacatagcaccagttaaggaataggctttattggagaaaaggaaggcttattagaccagcatcagcaaaaaaaaa

SEQ ID NO: 213 - DNA, 997 bp, Homo sapiens
agagagtcctcaacagaacctaatcatgctggcaccctaatctcatacttctagcctccagaactgagagaacataaactccagttgtttaagctacccagtctatggtatttgttattatagcccaagctaagtcaggtggaaaggcagaaatattttgagaagartcatttctacaaaaacagagttgttctaaatgaaatggccagatatttcatcttcttcatactagtatttatgaaagtttcattaaacaccacttggccagcacccaggcctgccaccctcagaacggcaaacaaaagcaaatgatttgaggaacaaaagagtggacacagagcctctcagaagatggctccatcttctgagatgatcttctgagatcatcaattttctgcacctgatgtcctactccaattgtagtagataagagcaaagacacttcctgatcctgtggaaaatgctggagccctgctgatggagaggctgacactgggaccaacagaaggccggacatttatttgctgcagcccttctgcacctgggccctcttcaggccttgtaccttgcactccccatgccactgtagcacctggtaagctgaagttaggtatttgaagagataatttgcccccaacaaagaattacttaaaagaaaaaggaaaccactaaattccacttgacaaaccagtttgttcagttttgacttttgcaaatttgaaactttctctttggcaccatatgattctgttacattagggctcatcaatgctaagatacacagctaggtctaccagctgccagtggtcaagaatgaaagaacctctcagagagagatcagtttctaataacctaacagttttccttggstattacmaaaaaaaaaaaaattagaataaaatgtcagtgccatgcaggcaagtacagatatggaaatgaaagctctgtctacaactgcaagatttgtttgttaataaaattgattgggatcactcga

SEQ ID NO: 214 - DNA, 1496 bp, Homo sapiens
  SITE (450): n equals a,t,g, or c
  SITE (451): n equals a,t,g, or c
  SITE (454): n equals a,t,g, or c
  SITE (1485): n equals a,t,g, or c
  SITE (1492): n equals a,t,g, or c
gaattcggcacgagtgaccacagatatctttggctttcagcctcaccacaatgctgtccactatgttttttttaatcgattgacatctcatgaatccacaaatttagccgcttttccatcttttccatctttgtcatagcttcatcacgcacgatggaggtcacttcagcactatccggagcggcctcacggacagatcrgtgaatttccttttcctttttcttgatgtaccggattgtcgactcgttaacattgagctcatggccaacagcactgtaactcatgcctgattggagcttatccaacacgcggamtttctccgtaaggsamatcamggtcttctttcgcttaggaacactgggcararcttaarcactacgcttgggggccattttagaaagcaaaaccacccacaaaaagcagaaaaaaaagtgtcagtaaacagactgnnganaggactctttgtttacagcacaggagctgcgactagaaggcggcgcttctccccagttcaaacttcagctgggaaccttacctccgccaactccaaattttcaccctctgcgcatgcccgggaaasaaacccccagaacagtaccgtgatgattgattttagggttacaaatacattttagcaagtaagtgaatttggcattacgaattaatgattaatgaaggtcacctgtatttccatagatatgtaattttatttaagcaggtttattatattaaggcggsgaggcagcgccgaagactacaagttccagcatgcaccgcgtccgggcgggttcgggctcccagcgagggcttcagggacgccagcccggaggcatcggccggaagtgtcgtagggcaaccacgtagtactctctgcgcatgtgcaaagcgctgtcgggggccgccctagctgccgtcgccgccgccggggctctatggtctctccctagagctttgccgttggaggcggctgctgcggtcttgtgagtttgaccagcgtcgagcggcagcaacatggaggaattcgactccgaagacttctctacgtcggaggaggacgaggactacgtgccgtcgggtgagcgattccgcctgaggcgagaagcgaattgccccgccccacgcctcacgtgaggcgcgctctgcccccgcgggcgtctgccctgtggcccaggtggtccaggggggctcctgttctcgagcgtccgctccctcaggcccctcatcctcggccgctccggcccgaggcgtgtgcgcgtggcggttctgtgctcccctcccgttgggcagctccggccgccgccccctcttgcagcgcgggaacggcacatggacacggccccttgtcgctagggacgctcgtcggtcagccccgaacgacaacgctgcttcagaagtcggggcggcagttcgagccttggaagtttttttcagccctggcccgagagagctgctggccaacaacccgtccaagatagagctgtccgntctccgnctgg

SEQ ID NO: 215 - DNA, 1308 bp, Homo sapiens
  SITE (7): n equals a,t,g, or c
  SITE (9): n equals a,t,g, or c
  SITE (1241): n equals a,t,g, or c
  SITE (1247): n equals a,t,g, or c
ttggcancngggagagggaaagaggaggaaatggggtttgaggaccatggcttacctttcctgcctttgacccatcacaccccatttcctcctctttccctctccccgctgccaaaaaaaaaaaaaaaggaaacgtttatcatgaatcaacagggtttcagtccttatcaaagagagatgtggaaagagctaaagaaaccaccctttgttcccaactccactttacccatattttatgcaacacaaacactgtccttttgggtccctttcttacagatggacctcttgagaagaattatcgtattccacgtttttagccctcaggttaccaagataaatatatgtatatataacctttattattgctatatctttgtggataatacattcaggtggtgctgggtgatttattataatctgaacctaggtatatcctttggtcttccacagtcatgttgaggtgggctccctggtatggtaaaaagccaggtataatgtaacttcaccccagcctttgtactaagctcttgatagtggatatactcttttaagtttagccccaatatagggtaatggaaatttcctgccctctgggttccccatttttactattaagaagaccagtgataatttaataatgccaccaactctggcttagttaagtgagagtgtgaactgtgtggcaagagagcctcacacctcactaggtgcagagagcccaggccttatgttaaaatcatgcacttgaaaagcaaaccttaatctgcaaagacagcagcaagcattatacggtcatcttgaatgatccctttgaaattttttttttgtttgtttgtttaaatcaagcctgaggctggtgaacagtagctacacacccatattgtgtgttctgtgaatgctagctctcttgaatttggatattggttattttttatagagtgtaaaccaagttttatattctgcaatgcgaacaggtacctatctgtttctaaataaaactgtttacattcattatggggtatgtatgaccttcattttccaagaaatagaactctagcttagaattatggatgctctaaaatgtcagaatgggaactctcctcgaagttctcccaaactcagagacagcactgccttctcctaaatgattattcttttctccctgttttctggtattttctaggcatccttctcaccacagccataacccttttttacttccattaggccgtataactggngggacngctggtcggtatataatactggtwccaacamaggggttctggatgtacacmaggttatctt

SEQ ID NO: 216 - DNA, 1705 bp, Homo sapiens
  SITE (1281): n equals a,t,g, or c
  SITE (1704): n equals a,t,g, or c
tggccatggaagcgctagaaggtttagattttgaaacagcaaagaaggatttccttggatctggagaccccaaagaaacaaagatgctaatcaccaaacaggctgactgggccagaaatatcaaggagcccaaagccgccgtggagatgtacatctcagcaggagagcacgtcaaggccatcgagatctgtggtgaccatggctgggttgacatgttgatcgacatcgcccgcaaactggacaaggctgagcgcgagcccctgctgctgtgcgctacctacctcaagaagctggacagccctggctatgctgctgagacctacctgaagatgggtgacctcaagtccctggtgcagctgcagtggagacccagcgctgggatgaggcctttgctttgggtgagaagcatcctgagtttaaggatgacatctacatgccgtatgctcagtggctagcagagaacgatcgctttgaggaagcccagaaagcgttccacaaggctgggcgacagagagaagcggtccaggtgctggagcagctcacaaacaatgccgtggcggagagcaggtttaatgatgctgcctattattactggatgctgtccatgcagtgcctcgatatagctcaagatcctgcccagaaggacacaatgcttggcaagttctaccacttccagcgtttggcagagctgtaccatggttaccatgccatccatcgccacacggaagatccgttcagtgtccatcgtcctgaaactcttttcaacatctccaggttcctgctgcacagcctgcccaaggacaccccctcgggcatctctaaagtgaaaatactcttcaccttggccaagcagagcaaggccctcggtgcctacaggctggcccggcacgcctatgacaagctgcgtggcctgtacatccctgccagattccaaaagtccattgagctgggtaccctgaccatccgcgccaagcccttccacgacagtgaggagttggtgcccttgtgctaccgctgctccaccaacaacccgctgctcaacaacctgggcaacgtctgcatcaactgccgccagcccttcatcttctccgcctcttcctacgacgtgctacacctggttgagttctacctggaggaagggatcactgatgaagaagccatctccctcatcgacctggaggtgctgagacccaagcgggatgacagacagctagagatttgcaaacaacagctcccagattcttgcggctagtgggagaccaagggactccatcggagatnaggacccgttcacagctaagctragctttgagcaaggtggctcaragttcgtgccagtggtggtgagccggctggtgctgcgctccatgagccgccgggatgtcctcatcaagcgatggcccccacccctgaggtggcaatacttccgctcactgctgcctgacgcctccattaccatgtgcccctcctgcttccagatgttccattctgaggactatgagttgctggtgcttcagcatggctgctgcccctactgccgcaggtgcaaggatgaccctggcccatgaccagcatcctggggacggcctgcaccctctgcccgccttggggtctgctgggctgtgaaggagaataaagagttaaactgtcaaaaaaaaaaaaaaaaaaaaaaaaaaaaaaaaaaaaaaaaaaaaaaaaaaaaana

SEQ ID NO: 217 - DNA, 999 bp, Homo sapiens
agcaaatcaccttaacgatctggaatgaaactgtgaccagtgccgccctgggtggttctggagagactgccgtcttcttgtttggccataggtgctggggccccggcttcagtcactgtctcagacagkagtcccgataagcagatcaccagtcctccactgtccttcctgtcggccttgctgcatgagaagatagctgcttcctccctcttttcctacactgtaaattattgttttacaattgagtgycttaataatagtytacaaatactatgtatttatgcaaaactgttaaagttctcatctgttatgattggatacttggtcttgtcagtagtggtcagcattgggttgtgagcttgtcctactccatacgtgtttatcctgctatgcattttacattgtgtgttcacatctattccaaggagccttgctagaaacaacactggcggttcctgcaggccaggcaggcattggcccatgctgtgtcccataggagccaatggaaagaacgtagcttggtctgctagccagccgtggggtggcgcaggccaggcagcctctgcaccagagtccagcacctgcccattccccagtcacacaatcatactcttctttcatagagattttattaccacctagaccaccctagttttcctctctgttagtgtcctgagctcttttgcaacaaaatgtaggtacagaccaatccctgtcccttccccaatcaggagctccacaccatgagttgtttggttttccagaagctgccagtgggttcccgtgaattgcgttaagatatcgatgatkttttttattgtttttcttcttgtttttttaaataatatatttaaaggcagtatcttttgtactgtgaatttgcagtagaagatgcagaatgcactttttttttacttctgttggtgtgtattgtatatagtgtgtgtgcttcttgtgatgaaaataaactttttctttataaaaaaaaaaaaaaaaaac

SEQ ID NO: 218 - DNA, 941 bp, Homo sapiens; identical to SEQ ID NO: 13

SEQ ID NO: 219 - DNA, 575 bp, Homo sapiens
taagtggaatcccccggggttgcagggaattcggcacgaggcattctgagaagcttaagacatactttgaagacaaccctagggacctccagctgctgcggcatgacctacctttgcaccccgcagtggtgaagccccacctgggccatgttcctgactacctggttcctcctgctctccgtggcctggtrcgccctcacaagaagcggaagaagctgtcttcctcttgtaggaaggccaagagagcaaagtcccagaacccactgcgcagcttcaagcacaaaggaaagaaattcagacccacagccaagccctcctgaggttgttgggcctctctggagctgagcacattgtggagcacaggcttacacccttcgtggacaggcgaggctctggtgcttactgcacagcctgaacagacagttctggggccggcagtgctgggccctttagctccttggcacttccaagctggcatcttgccccttgacaacagaataaaaattttagctgccccaaaaaaaaaaaaaaaaaaaaaaactcgagggggggcccgtacccaattcgccctataa

SEQ ID NO: 220 - DNA, 3018 bp, Homo sapiens
gccagccttacaggttttacgtgaaatgaaagccattggaatagaaccctcgcttgcaacatatcaccatattattcgcctgtttgatcaacctggagaccctttaaagagatcatccttcatcatttatgatataatgaatgaattaatgggaaagagattttctccaaaggacccggatgatgataagttttttcagtcagccatgagcatatgctcatctctcagagatctagaacttgcctaccaagtacatggccttttaaaaaccggagacaactggaaattcattggacctgatcaacatcgtaatttctattattccaagttcttcgatttgatttgtctaatggaacaaattgatgttaccttgaagtggtatgaggacctgataccttcagcctactttccccactcccaaacaatgatacatcttctccaagcattggatgtggccaatcggctagaagtgattcctaaaatttgggaaagatagtaaagaatatggtcatactttccgcagtgacctgagagaagagatcctgatgctcatggcaagggacaagcacccaccagagcttcaggtggcatttgctgactgtgctgctgatatcaaatctgcgtatgaaagccaacccatcagacagactgctcaggattggccagccacctctctcaactgtatagctatcctctttttaagggctgggagaactcaggaagcctggaaaatgttggggcttttcaggaagcataataagattcctagaagtgagttgctgaatgagcttatggacagtgcaaaagtgtctaacagcccttcccaggccattgaagtagtagagctggcaagtgccttcagcttacctatttgtgagggcctcacccagagagtaatgagtgattttgcaatcaaccaggaacaaaaggaagccctaagtaatctaactgcattgaccagtgacagtgatactgacagcagcagtgacagcgacagtgacaccagtgaaggcaaatgaaagtggagattcaggagcagcaatggtctcaccatagctgctggaatcacacctgagaactgagatataccaatatttaacattgttacaaagaagaaaagatacagatttggtgaatttgttactgtgaggtacagtcagtacacagctgacttatgtagatttaagctgctaatatgctacttaaccatctattaatgcaccattaaaggcttagcatttaagtagcaacattgcggttttcagacacatggtgaggtccatggctcttgtcatcaggataagcctgcacacctagagtgtcggtgagctgacctcacgatgctgtcctcgtgcgattgccctctcctgctgctggacttctgcctttgttggcctgatgtgctgctgtgatgctggtccttcatcttaggtgttcatgcagttctaacacagttggggttgggtcaatagtttcccaatttcaggatatttcgatgtcagaaataacgcatcttaggaatgactaaacaagataatggcagtttaggctgcacaactggtaaaatgactgtagataaatgttgtaattagtgtacacgtttgtatttttgttaatatagccgctgccatagttttctaacttgaacagccatgaatgtttcatgtctcccttttttttttgtctatagctgttacctattttagtggttgaaatgagagctagtgatgacagaaggatgtggaatgtcttcttgacatcattgtgtattgctggtaatcaagttggtaacgactacttctagcagctcttaccactatgacttaagtggtcctggaaggcagtaagtggaggtttgcagcattcctgccttcatgagggcttctaccactgaccactttgcacgtacctggctcccagatttacttaggtaccccacgagtcgtccacataagcagcttcatctttaccttgccagagttgacaattatgggatactctagtctacttatacttgtgttcccatctgtctgccatcctctgaaggccaggacccagtcatacatccttagaaaccaaagtatggtttttgttttctcttggaatgtcaggtcttaaggcatttaattgagggacaaaaaaaaaaaaaagccgatatagtagctagctacttaagcatccatgggtattgctccatatcaaagcagatttgcaggacagaaagagtaaattagccttcagtcttggtttacagcttccaaggagagccttggscacctgaaatgttaactcggtcccttcctgtctctagttcatcagcacctgcagatgcctgactcttgttagccttactattcaatacagtccttagattcacggtatgcctcttcctatccaggcacctattctgaatcaccatgttgctctgcagctagagttgataggagaaaatccatttgggtagatggcctatgaatttgtagtagactttcaaaatgagtgatttgttagcttggtacttttaagtttgtggtacagatcctccaaacccatactctgagcaattaactgccttgaacatagagaaaaattaaggcctcacaggatgagtctccattctctgtaaatgcttattttatcatagtctttagcctctaactatgagtaaaatgttctcttcggccgggtgtggtgactcacacctgtaacctcagcactttgggaggcagaggtgggaggatcacttaggtccaggagttcgagactagcctgggcaacatagtgagacaccggatctacaaaaaaataaaaagccagactggtggtatgtatctgtgtcccagctaattgggagggtgagatgggaggattgtttgagcctaggagagggaggttgcagtgagccgtgatcgcaccactgcactccagcctgggcaacagagcaagaccctgtcttggagaaaccagaattttggaagagcaaatggggctgagtgcagtggctcatgcctgtaatcc

SEQ ID NO: 221 - DNA, 2031 bp, Homo sapiens
aggatatgcatgattcttaaccaggctatatgttaaaaaaaaattggaaaatgcaatacattttttattatacaaactacagaatgagtatgcaagttttatttatcaaaatgtaatggatttttaaaggctgagaaattttccttatacctaccttttcagttattttaattataccaaattatcaactagaatagcttcatccatatgaaatataaaatgaagagacacctaggctctatcaggcttaggattctttgaacttatttccactttaatttctcagtggaagttaagaggggtgagaaaacaaagaaggggaaaaactgacaactaacaaaaccagcaccacatcgctaggtggtgcttactaattaccttctcaggattttcctcagattgaaaagcttatgaggatttcttgggagtcttaataacctgcctgttagtacagagctttcctgatgatatttactcttgagcacatgtggttgtaaaaccttaactttctttctccaggagggtggtgatagaaacagatggtagtatttatgaactgatgttctcgtgaaatgttgagggtggggagaaaagactttaagggaggagagccatctattttgttcctaaagccacctctcagcagaatcgtcatgtttttctgatgcaccgctctgcttcatgcccaagatgacttgcgaggcaatctcaggagctgtggacttaaccrttgcaaagcacactgtctttctcagcgttctctgcaagtcagtaggtgttagtatggttgcaaagttcactgtctcagcaaagttgaactgggctacctctctacagctgtttcctcagagggaaaaatcttgagaccagatggtggagctctggagtcagaggaaatgggtgtcttcagcacaaagctgctgcttttacttcagccacttctgacatttttacataccgagcctgagattrtgtgattatctcaaatcaaatcactttgatggagataaataatcaaaactgttttatagtcattgatttggtgagaacagtaatggaaaatggtgttgaaggacttctcatttttggagctttccttccagagtcctggctgattggtgttcgctgttcatctgagcccccaaaagcattattactgatacttgcacacagtcaaaagcgcagactggatggatggtcttttataaggcatttaagggtacactactgtgtttcactgaccatacatttttcttagcccctcaagtaatatagcacagagttatgaatgacaattcccctaaccattcctcttcatatctgcctcttccccttaccatcgtaattctccaaactggtcataaaggcactctgtgaagatattggggactgacatcttaagctctcacctggctgcagtaggaaaggccaaactgacgacaaaaaaaaaattctttataaagatgatatggtaacatgtatctttgccctgggtctgggtgggtccagtcagtctcagatttacaagcatttaggagcctaggtaaaagctgctagtattcttttaaaagttacatttatgacttgcaatgatagaaaactccttccaattaaatggcattttataatattatgtgtgtacttcacagtgttaaaaataccctcatacgttattgcatttgatcttcacagaaagtgcattttaaccagtactctgggtgcaataaataatatgtagaaatttaagtcctccaattccagcatatccagtgagttttgacagtgtgtttatgtggaatgtttaaggatatacaattgtactttatataaattggttcttgttcttcttaaatgtgacatgaaataattgtgctgctacattatactggaaattaacaggggaaaagggaagagctcttggctcccttgaggttctgctagtggtgttaggagtggttacaactgagcttttagtaaccatttaaccgtatgtaaacttggtttctaattaaaaaaaaatttctttttcca

SEQ ID NO: 222 - DNA, 968 bp, Homo sapiens
  SITE (241): n equals a,t,g, or c
  SITE (954): n equals a,t,g, or c
  SITE (961): n equals a,t,g, or c
ggcacgagggccgcgggacatccacggggcgcgagtgacacgcgggagggagagcagtgttctgctggagccgatgccaaaaaccatgcatttcttattcagattcattgttttcttttatctgtggggcctttttactgctcagagacaaaagaaagaggagagcaccgaagaagtgaaaatagaagttttgcatcgtccagaaaactgctctaagacaagcaagaagggagacctactnaaatgcccattatgacggctacctggctaaagacggctcgaaattctactgcagccggacacaaaatgaaggccaccccaaatggtttgttcttggtgttgggcaagtcataaaaggcctagacattgctatgacagatatgtgccctggagaaaagcgaaaagtagttatacccccttcatttgcatacggaaaggaaggctatgcagaaggcaagattccaccggatgctacattgatttttgagattgaactttatgctgtgaccaaaggaccacggagcattgagacatttaaacaaatagacatggacaatgacaggcagctctctaaagccgagataaacctctacttgcaaagggaatttgaaaaagatgagaagccacgtgacaagtcatatcaggatgcagttttagaagatatttttaagaagaatgaccatgatggtgatggcttcatttctcccaaggaatacaatgtataccaacacgatgaactatagcatatttgtatttctactttttttttttagctatttactgtactttatgtatwaaacaaagtcmcttttctccmagttgkatttgctatttttcccctatgagaagatattttgatctccccaatacattgattttggtataataaatgtgaggctgttttgcaaacttaaaaaaaaatttaaaaaaactggaggggggcccgtacccaantcgccgnatatgat

SEQ ID NO: 223 - DNA, 1404 bp, Homo sapiens
  SITE (1351): n equals a,t,g, or c
cgttttccggccgtgcgtttgtggccgtccggcctccctgacatgcagccctctggaccccgaggttggaccctactgtgacacacctaccatgcggacactcttcaacctcctctggcttgccctggcctgcagccctgttcacactaccctgtcaaagtcagatgccaaaaaagccgcctcaaagacgctgctggagaagagtcagttttcagataagccggtgcaagaccggggtttggtggtgacggacctcaaagctgagagtgtggttcttgagcatcgcagctactgctcggcaaaggcccgggacagacactttgctggggatgtactgggctatgtcactccatggaacagccatggctacgatgtcaccaaggtctttgggagcaagttcacacagatctcacccgtctggctgcagctgaagagacgtggccgtgagatgtttgaggtcacgggcctccacgacgtggaccaagggtggatgcgagctgtcaggaagcatgccaagggcctgcacatagtgcctcggctcctgtttgaggactggacttacgatgatttccggaacgtcttagacagtgaggatgagatagaggagctgagcaagaccgtggtccaggtggcaaagaaccagcatttcgatggcttcgtggtggaggtctggaaccagctgctaagccagaagcgcgtgggcctcatccacatgctcacccacttggccgaggctctgcaccaggcccggctgctggccctcctggtcatcccgcctgccatcacccccgggaccgaccagctgggcatgttcacgcacaaggagtttgagcagctggcccccgtgctggatggtttcagcctcatgacctacgactactctacagcgcatcagcctggccctaatgcacccctgtcctgggttcgagcctgcgtccaggtcctggacccgaagtccaagtggcgaagcaaaatcctcctggggctcaacttctatggtatggactacgcgacctccaaggatgcccgtgagcctgttgtcggggccaggtacatccagacactgaaggaccacaggccccggatggtgtgggacagccaggyctcagagcacttcttcgagtacaagaagagccgcagtgggaggcacgtcgtcttctacccaaccctgaagtccctgcaggtgcggctggagctggcccgggagctgggcgttggggtctctatctgggagctggccagggcctggactacttctacgacctgctctaggtgggcattgcggcctccgcggtggacgtgttcttttctaagccatggagtgagtgagcaggtgtgaaatacaggcctncactccgtttgctgtgaaaaaaaaaaaaaaaaaaaaaaaaaaaaaaaaaaaaa

SEQ ID NO: 224 - DNA, 707 bp, Homo sapiens
  SITE (1): n equals a,t,g, or c
  SITE (705): n equals a,t,g, or c
  SITE (706): n equals a,t,g, or c
  SITE (707): n equals a,t,g, or c
ngcgcgcctgcagtcgacactagtggatccaaagaattcggcacgagggcaggtccagggctcagaaatcagctctattgacgaattctgccgcaagttccgcctggactgcccgctggccatggagcggatcaaggaggaccggcccatcaccatcaaggacgacaagggcaacctcaaccgctgcatcgcagacgtggtctcgctcttcatcacggtcatggacaagctgcgcctggagatccgcgccatggatgagatccagcccgacctgcgagagctgatggagaccatgcaccgcatgagccacctcccacccgactttgagggccgccagacggtcagccagtggctgcagaccctgagcggcatgtcggcgtcagatgagctggacgactcacaggtgcgtcagatgctgttcgacctggagtcagcctacaacgccttcaaccgcttcctgcatgcctgagcccggggcactagcccttgcacagaagggcagagtctgaggcgatggctcctggtcccctgtccgccacacaggccgtggtcatccacacaactcactgtctgcagctgcctgtctggtgtctgtctttggtgtcagaacttttgggccgggcccctccccacaataaagatgctctccgaccttcaaaaaaaaaaaaaaaaaaactcrgggggggcccggtcccaatccccccnnn

SEQ ID NO: 225 - DNA, 1384 bp, Homo sapiens
ggggaactgcagtgacagcaggagtaagagtgggaggcaggacagagctgggacacaggtatggagagggggttcagcgagcctagagagggcagactatcagggtgccggcggtgagaatccagggagaggagcggaaacagaagaggggcagaagaccggggcacttgtgggttgcagagcccctcagccatgttgggagccaagccacactggctaccaggtcccctacacagtcccgggctgcccttggttctggtgcttctggccctgggggccgggtgggcccaggaggggtcagagcccgtcctgctggagggggagtgcctggtggtctgtgagcctggccgagctgctgcaggggggcccgggggagcagccctgggagaggcaccccctgggcgagtggcatttgctgcggtccgaagccamcaccatgagccagcaggggaaaccggcaatggcaccaktggggccatctacttcgaccaggtcctggtgaacgagggcggtggctttgaccgggcctctggctccttcgtagcccctgtccggggtgtctacagcttccggttccatgtggtgaaggtgtacaaccgccaaactgtccaggtgagcctgatgctgaacacgtggcctgtcatctcagcctttgccaatgatcctgacgtgacccgggaggcagccaccagctctgtgctactgcccttggaccctggggaccgagtgtctctgcgcctgcgtcgggggaatctactgggtggttggaaatactcaagtttctctggcttcctcatcttccctctctgaggacccaagtytttcaagcacaagaatccagcccctgacaactttcttctgccctctcttgccccagaaacagcagaggcaggagagagactccctctggytcctatcccacytctttgcatgggamcctgtgccaaacacccaagtttaagaraararyararctgwggcaggtatacagagctggaagtggaccatggaaaacatsgataaccatgcatcytcttgcttggccacctcctgaaactgtccacctttgaagtttgaactttagtccctccamactctgactgctgcctccttcctcccagctctctcactgagttatyttcactgtacctgttccagcatatccccactatctctctttctcctgatctgtgctgtcttattctcctccttaggcttcctattacctgggattccatgattcattccttcagaccctctcctgccagtatgctaaaccctccctctctctttcttatcccgctgtcccattggcccagcctggatgaatctatcaataaaacaactagagaatggtggtcaaaaaaaaaaaaaaaaaactcga

SEQ ID NO: 226 - DNA, 774 bp, Homo sapiens
  SITE (773): n equals a,t,g, or c
tttaaagatgaagaaatgacaagggagggagatgagatggaaaggtgtttggaagagataaggggtctragaaagaaatttagggctctgcattctaaccataggcattctcgggaccgtccttatcccatttaattaatttctctgacaattcaattattttctgttattaatgttgccactgctttctgtttgtctgcactttcttgataaatatttgctatcgttttactccagtcattcgatgttgctgagatttacatatgactcttgtcaacatctcatcttttgacccaatcttattcatttaataagaggtctcattcatttgcatggaaaaatgctcattgtatattgcaaagtgaaaataacgagttgcaaaacagtgtatacatatatgtgtgtatatatgtacactttatttgtacatttctatgtgacataatgcaaaggaaagtgtctgattttattatacaccaaaggttaacagtgaatctctgtgtgatctctttttttttctttttgcctatctgcatcttctcacttgccaaaaaatgaatatatgtttatgtgtgtatattacttgtgtcacaaaaaaccctaaagtagacagtaaaagaacttgtcaatcgcctttggaaggcaatgaaacacttaataaactctcaataacagaagcgtaaaaatgaaatgtaaacctccaattacctctggatctcttagccagagtaataaactggtaattattacagataaaaaaaaaaaaaaaaaana

SEQ ID NO: 227 - DNA, 865 bp, Homo sapiens
  SITE (344): n equals a,t,g, or c
ccacgcgtccggcctttcttggccagaggcgccggttggactcacgggcggggcatgatgggtaacaggaccggtggggtccccaggaagtcctagagggggtcggggtttgggtggacaagctttcctcgtcctctcccgacagagctgacgtgtcctgggttccaccgggagcgggcatttccaccggacgggagggttcggggtgtccggggctggggaatacgtaggggttgccgcgcggtgtggggagttggggcgtgtggctgcagtcccgggagttcttggagggggtcggcccaccgagcttccggaccggctgatctgcccgtagcttgccgganggarggcggagctgactctccgtcccttctcccatcccctccagtggtgggtacgggcacctcgctggcgctctcctccctcctgtccctgctgctctttgctgggatgcagatgtacagccgtcagctggcctccaccgagtggctcaccatccagggcggcctgcttggttcgggtctcttcgtgttctcgctcactgccttcaataatctggagaatcttgtctttggcaaaggattccaagcaaagatcttccctgagattctcctgtgcctcctgttggctctctttgcatctggcctcatccaccgagtctgtgtcaccacctgcttcatcttctccatggttggtctgtactacatcaacaagatctcctccaccctgtaccaggcagcagctccagtcctcacaccagccaaggtcacaggcaagagcaagaagagaaactgaccctgaatgttcaataaagttgattctttgtaaaaaaaaaaaaaaaaaaaaaaaaaaaaaaaaaaaaaaa

SEQ ID NO: 228 - DNA, 1102 bp, Homo sapiens
  SITE (462): n equals a,t,g, or c
  SITE (469): n equals a,t,g, or c
ttttttttttaccatttaaaataaaatgaaagtgaccttctgtttataaaaatctttgtctgcatctctgcttatttccttagaagagattccaagaagcggtgagtgatttcacggcagcagagggttgggacatattacgggcgcggatccctcttggagtgagatgactctccggagagatttagtcgtcaccctcgcgtgtgaggctgcgtcacaccccagggatgtgtctatcaagatggaagatcttttacacgctcttgattttgtttgsctytttttctattactagtgagaakgaaactttttatatgattattatccatcataatccaacacaaattactgcttcatgttcttttactttcctgtgaaggttttagtgccttttaaaaattgctatatattaagcttgttaatacttccatgctgtatttgtggscatcartttccccgggnacaggcntgcacattttgccttcacacgctgggtggtttttcattttcamttctatttctcgttcttctatcgttttatgttcagacgggtttctccgtgtagaaagcagtttatgaagatttactttcgacagtcttctctctactttctacagtgaattctctgatgtgtctgggagtttgggggtctgggtaagartcctcctctcaccctattctctattacgatccacagcctcatgctttatgarattggtggccgggarcgggggagatttgcggatcccccaagccagactttatccccctatccctgcctctggatcccacgtacaggcctgggaactccctgtgggtaggggccaatggtctcgcactctcacctgtaccccagggctggcacaggatggtcaaggagagaggctgcccaagcgcatccytctggtgtccccctgacacgcctccaaagtgagcaggtaggtttcaacagccccacgttgcaggtgggagatgaagctcagggtggagaccagtatctcacagttctctttgcatggccgggtacttgttagtcaactgatcaagtgaaaattctagccccagaggcaggagaatccggaacaaaattaaaccagccagg

SEQ ID NO: 229 - DNA, 744 bp, Homo sapiens
  SITE (303): n equals a,t,g, or c
  SITE (392): n equals a,t,g, or c
gaattcggcacgagagtggctggagtctggctgcagagggaagacatcagcagggagggagccagggcctgtcacatctttcctctggccattgtcctggtctttgtaagcccagaatctccccttccctgaagggaggccagcaccccaggagggcagcaggtgtgctgtgagggttggagtagtgtgagaggtcagggtacactagaatggccatggacaccatgtgggggtgctctgggctgggccacagaacagtgtccttcctgctgctcctcccctgcagcttcccccgaccttgtngtttatttggtttgataccaatcagcagaccctgcaaggtggaagctcccaggctctcagtcccacsactctcatgtgccagtcacccntactgtaactgcccaatgagtacttcttgcccactgccaagatagagccagtttaccaagacaggggaattgcagtagagaaagagttgaatatacatagagccagctaaatgggagagtggagttttcttattacttaaatcagcctcccytaaaattcagaggtgagaatttttcaaggacagtttggtggscaggcctagggaatggatgctgctgattggctagggatgcaatcataggggtgtagaaaagtwccttgtgcactgagtccacttttggtgagagctaccaaggagctgctggtctgctggtcccggtagagccatctggtgtcaggaatgcaaaagtg

SEQ ID NO: 230 - DNA, 1935 bp, Homo sapiens
  SITE (1): n equals a,t,g, or c
  SITE (1921): n equals a,t,g, or c
  SITE (1927): n equals a,t,g, or c
ntctaccctaatcaagatggggacatacttcgcgaccaggttcttcatgaacatatccagagattgtctaaagtagtgactgcaaatcacagagctcttcagataccagaggtttatcttcgagaagcaccatggccatctgcacaatcagaaatcaggacaataagtgcttataaaaccccccgggacaaagtgcagtgcatcctgagaatgtgctctacgattatgaacctcctgagcctggccaatgaggactctgtccctggagcggatgactttgttcctgtgttggtgtttgtgttgataaaggcaaatccaccctgtttgctgtctactgtgcagtatatcagtagcttttatgctagctgtctgtctggagaggagtcctattggtggatgcagttcacagcagcagtagaattcattaaaaccatcgatgaccgaaagtgaccaagaccaaggcccaccaaggcagcagactgttaatcagacaaacagatctctgagaaggtgcatcagctgctttgaaggctgaagattgttttgtatgatactgcacagcatcaggcattttaaagcagatctttactaaacaggttaatgagctaacaagcaggttctctcgtctttgggctctttcctttctgagttgcatattctattttcttgtccccaagtagagactagtactacaaaaagggaccacatttttcaagtatttctaagtataaaaaacaaaacaaaaatctcttaggaaatgtctagacctccattcttggattccctttctttccttttattttaaaaaagaacagtacccctcttttaagatgctgtcttacattaatgagcatctaatggaaagaaggtatgagttgcactgaggattagaatagtggtgcgttagtggcattatctataaatacactcacctaaattgaaagctaagaaggaaatgtaaatataatatatatttatatttgatgtaatatggacatctgcagattctaataaacaaggactattgctgatagtaggctgtgacatactgtcttgtgaaatggtttccttgacaaaatttaagctgagcttaaaagcaaaaaaacaaaaagtacacagaaatatttattaaaatgtaatacagtttattgaactttctaggtatggagtttgatggacagggctgcctytaatgagtgtgaaggtcactaagtcacttagacatctcaccgtggaagtttgtgagcctgcattaggagatagactgattaccatacatgacataaaaaggaacagtggatagctcatactttatggtggttcttctcctccgaaataatatactgcagaaatcccagacagagctccttacaaacctttaattgtaatatatttttgatgattattcacattgaatgcacagaccaagaattcagtgaatgtcattttttaaaaaactaatttgtattgtctgctctagtgatacaagttttactagtgataaactattttaatcaaccatactattcttatggaaaaaaatatctattttggcaggtttctgtgcctttatttccctcttctgaaaaaaagtctgtgttttcatagtttggtttgcattgtatatcaataattaatcaggaatgggttttggtgcctgaaaaattggccatggaggcacaccaaagcttcaagcacaagtcttgtacatgggccatcactgtctggtttcacttcgtgtgtttcctaaacacatttagctgcttttttaacaaactcagccccatacttgagtcccttgttgttgggagcatttccaggcatcttttaagggaactgtgacaaacagcctcgggcagatgaacacggaggctctctgttgtctgtctctgagatctttgtgtctgggaatgcctaaagnttttgntttttttt

SEQ ID NO: 231 - DNA, 1035 bp, Homo sapiens
  SITE (1032): n equals a,t,g, or c
  SITE (1034): n equals a,t,g, or c
agaggcctggctgcgttgccctatctccgtctccgccacccacttagcgttttaggcatcaattaccagcagtttctccgccactatctggaaaattacccgattgctcccggcagaatacaagagcttgaagaacgccgcagttgcgtggaagcctgcagagcaagggaagcagcgtttgatgccgaatatcagcgaaatcctcacagggtggacctcgatattttaacctttacgatagctctgactgcctctgaagttatcaaccctctgatagaagaacttggttgcgataagtttatcaatagagaatagttaggtggtgacactacttcaagagaacctctgcattccagtcataccaatcctgcaacttgattttcagaagtcaagagtatatcgcgataagacagtgcacaggtggaggggaaaaaaagggggagggggaagcttatcttgaaaaagcatcacagaagtagaaaaaaatgtcgaaagcattataactgtaacgttctttgagtttgtgattgatccacatttttccccctgcattatggaaaatgtctctcagcattgctttattacaaagtaaaggatggttttataaaattgagactgatgaaacatcaatactagagcccatgaggatgaaagaaattatcaaatagtgctgaacagaataagatgttaacgctgagttattaggactggaaggctatgaaaagaacttgaaattgtcggaatatgtgctctcttcatgtcatattcaatagaagtttctagtttaagattgattttgtgttttcttaggcatttcaagtgacaagcaaagtaaatgtatatattatgtgataaatcatgttttcaagaacgtcaaatttctggacttttttctttcaatttttaatttttaaagtttttttggtattaaaaaatcyattcacaagccaaaaaatwtwtwaaatwtwcmgcgaaaagccaaaaaaaaaaaaaammagggggggccgggccccatccccccaagggggtccngnt

SEQ ID NO: 232 - DNA, 2218 bp, Homo sapiens
aggtattaggcccttttgtgggagccccatgttttgtttttctgagttggtggggagggasggagggggagggctgaattgttttgcagaggaagatggcatctgtgctttaaatttctcattactgggttagaaaacaaagagggaktgccctgcacattttcttttgtgcttttaaatgtttcttaagttggaacaggtttcctcgggcctgttttgactgattgctggagtgcatttgatagttaaaaattactaattggttttatttcccttcacactctgcctccccacttctccccccgttactgaaaaataaccattttagtgtcaggctagaaattgaattgctgagttttgtgtatcctttaaattaaaaaccacaagtgtttattgtagtggttaaactgtagcatctcagcatctgggtggaagctgcctatatttcttcccagtttaactggggaccatctgtgaaattaattttccatccagacagctgctgtgagcaaatgaacataaatgctcgctggaaatttactaaccagtttttatattgacctgcagtgtaaaaagcacatttaattataaacaatatattcaaaatgggcaaattttattttcaaatgcagtgtagagctagattaaaagcaactctttgccacctactctgcccttttggcaaagttaccttgaacaaagaatcttaagggtttattaagaactctttattttcttcataccctgttctctgcagtgctttctaacagcttctgggtgcagattttcttcggcatccttttgcactcagcttattacaggtaggtagtgcttaagaaaagtcatggaggactaaagcctaagtccttttcacttttcctccatctgaaggtaggtgagttcatcctcttcatagtaatgctgttttaccaagactttatagcagatggacccagaaagaattttctgctattgtgttcactacaacaggatagggacatcagacagccccagaaaccccttccagatctgatatgggactattaatttttatgctgttaattggtattcattcacaatgcagttgaagggggaaggctccactgcattctttggctaaggcctgaatgcttgctcatctgtaagatctatactcgaggttttgttttccttttaaaattctttagggagagagggatggtttctgaggggttctgaaagtatgattcaatgtgcaacatacaggtaggtcttcagcataagctgaaatatatgcatgtaaaaactttgacatctttttttttaattttccactttcttcttaactttacttctctttttgtcccccccccatcttacagaagttgaggccaagggagaatggtaggcacagaagaaacatggcaaactgctctgtgctttcaaaccaaagtgttccccccaaccccaaatttgtctaagcactggccagtctgttgtgggcattgttttctacaaccaaattctgggtttttttcttctttctttaaacatagaggtaccaccacaagggatgccctactctctcgcagctcttgaaagcatctgtttgagggaaaggtctctgggcaagcaagtggttatttggattgcttgcttccctttttccacctgggacattgyaatcataaaataacagtaaattccaaacctcaaaaactattatggcctgagcacagctgaaatctagcagagtttaactcttctgcctccatgtctgtcacttataattcaggttctgctgttggcttcagaacatgagcagaagaatcgttttatgctagttattgcattcatggttgaaactcaacttagggaaagggttccaatgtattaagcaatgggctgcttctccccaatcctccctaacaattcgttgtgtggacttctcatctaaaaggttagtggcttttgcttgggatcagtgctctctattgatgttcttgctggtctccagacacattcctgttgcattaagacttgaaagacttgtagatgtgtgatgttcaggcacaggatgctgaaagctatgttactattcttagtttgtaaattgtccttttgataccatcatcttgttttctttttgtaggtataaataaaaacactgttgacaataaaaaaaaaaaaaaaaaaaaaaaaaaaaaaaaaaaaaaaaaaaaaaaaaaaaaaaaaaaaa

SEQ ID NO: 233 - DNA, 2057 bp, Homo sapiens
ccgagccggctgcgccgggggaatccgtgcgggcgccttccgtcccrgtcccatcctcgccgcgctccagcacctctgaagttttgcagcgcccagaaaggaggcgaggaaggagggagtgtgtgagaggagggagcaaaaagctcaccctaaaacatttatttcaaggagaaaagaaaaagggggggcgcaaaaatggctggggcaattatagaaaacatgagcaccaagaagctgtgcattgttggtgggattctgctcgtgttccaaatcatcgcctttctggtgggaggcttgattgctccagggcccacaacggcagtgtcctacatgtcggtgaaatgtgtggatgcccgtaagaaccatcacaagacaaaatggttcgtgccttggggacccaatcattgtgacaagatccgagacattgaagaggcaattccaagggaaattgaagccaatgacatcgtgttttctgttcacattcccctcccccacatggagatgagtccttggttccaattcatgmtgtttatcctgcagctggacattgccttcaagctaaacaaccaaatcagrgaaaatgcagaagtctccatggacgtttccctggcttaccgtgatgacgcgtttgctgagtggactgaaatggcccatgaaagagtaccacggaaactcaaatgcaccttcacatctcccaagactccagagcatggagggccggttactatgaatgtgatgtccttcctttcatggaaattgggtctgtggcccatgaagttttaccttttaaacatccggctgcctgtgaatgagaagaagaaaatcaatgtgggaattggggagataaaggatatccggttggtggggatccaccaaaatggaggcttcaccaaggtgtggtttgccatgaagaccttccttacgcccagcatcttcatcattatggtgtggtattggaggaggatcaccatgatgtcccgacccccagtgcttctggaaaaagtcatctttgcccttgggatttccatgacctttatcaatatcccagtggaatggttttccatcgggtttgactggacctggatgctgctgtttggtgacatccgacaggcatcttctatgcratgcttctktccttctggatcatcttctgtggcgagcacatgatggatcagcacgagcggaaccacatcgcagggtattggaagcaagtcggacccattgccgttggtccttctgcctcttcatatttgacatgtgtgagagaggggtacaactcacgaatcccttctacagtatctggactacagacattgggaacagagctggccatggctttcatcatcgtggctggaatctgcctctgcctctaacttcctgtttctatgcttcatggtatttcaggtgtttcggaacatcagtgggaagcagtccagcctgccagctatgagcaaagtccggcggctacactatgaggggctaatttttaggttcaagttcctcatgcttatcaccttggcctgcgctgccatgactgtcatcttcttcatcgttagtcaggtaacggaaggccattgggaaatggggcggcgtcacagtcccaagtgaacagtgcctttttcacaggcatctatgggatgtggaatctgtatgtctttgctctgatgttcttgtatgcaccatcccataaaaactatggagaagaccagtccaatggaatgcaactcccatgtaaatcgagggaagattgtgctttgtttgtttcggaactttatcaagaattgttcagcgcttcgaaatattccttcatcaatgacaacgcagcttctggtatttgagtcaacaaggcaacacatgtttatcagctttgcatttgcagttgtcacagtcacattgattgtacttgtatacgcacacaaatacactcatttagcctttatctcaaaatgttaaatataaggaaaaaagcgtcaacaataaatattctttgagtattgtcttacttctcttaaaaaaaaaaaaaaaaactcgtgccgaattcggcacgagcggcacga

SEQ ID NO: 234 - DNA, 2084 bp, Homo sapiens
  SITE (775): n equals a,t,g, or c
  SITE (2080): n equals a,t,g, or c
  SITE (2083): n equals a,t,g, or c
ggcagagggccatttcctgcaaagagccaaacccccattcctctgtgcccctcctctcccaccaagtgctttataaaaatagctcttgttaccggaaataactgttcatttttcactcctccctcctaggtcacacttttcagaaaaagaatctgcatcctggaaaccagaagaaaaatatgagacggggaatcatcgtgtgatgtgtgtsctgcctttggctgagtgtgtggagtcctgctcaggtgttaggtacagtgtgtttgatcgtggtggcttgaggggaaccgcttgttcagagctgtgactgcggctgcactgcagagaagctgcccttggctgctcgtagcgccgggccttctctcctcgtcatcatccagagcagccagtgtccgggaggcagaaggtaccggggcagctactggaggactgtgcgggcctgcctgggctgccccctccgccgtggggccctgttgctgctgtccatctatttctactactccctcccaaatgcggtcggcccgcccttcacttggatgcttgccctcctgggccttctcgcaggcactgaacatcctcctgggcctcaagggcctggccccagctgagatctctgcagtgtgtgaaaaagggaatttcaacgtggcccatgggctggcatggtcatattacatcggatatctgcggctgatcctgccagagctccaggcccggattcgaacttacaatcagcattacaacaacctgctacggggtgcagtgagccagcggtgtnatattctcctcccattggactgtggggtgcctgataacctgagtatggctgaccccaacattcgcttcctggataaactgccccagcagaccggtgaccgtgctggcatcaaggatcgggtttacagcaacagcatctatgagcttctggagaacgggcagcgggcgggcacctgtgtcctggagtacgccacccccttgcagactttgtttgccatgtcacaatacagtcaagctggctttagcggggaggataggcttgagcaggccaaactcttctgccggacacttgaggacatcctggcagatgcccctgagtctcagaacaactgccgcctcattgcctaccaggaacctgcagatgacagcagcttctcgctgtcccaggaggttctccggcacctgcggcaggaggaaaaggaagaggttactgtgggcagcttgaagacctcagcggtgcccagtacctccacgatgtcccaagagcctgagctcctcatcagtggaatggaaaagcccctccctctccgcacggatttctcttgagacccagggtcaccaggccagagcctccagtggtctccaagcctctggactgggggctctcttcagtggctgaatgtccagcagagctatttccttccacagggggccttgcagggaagggtccaggacttgacatcttaagatgcgtcttgtccccttgggccagtcatttcccctctctgagcctcggtgtcttcaacctgtgaaatgggatcataatcactgccttacctccctcacggttgttgtgaggactgagtgtgtggaagtttttcataaactttggatgctagtgtacttagggggtgtgccaggtgtctttcatggggccttccagacccactccccacccttctccccttcctttgcccggggacgccgaactctctcaatggtatcaacaggctccttcgccctctggctcctggtcatgttccattattggggagccccagcagaagaatggagaggaggaggaggctgagtttggggtattgaatcccccggctcccaccctgcagcatcaaggttgctatggactctcctgccgggcaactcttgcgtaatcatgactatctctaggattctggcaccacttccttccctggccccttaagcctagctgtgtatcggcacccccaccccactagagtactccctctcacttgcggtttccttatactccacccctttctcaacggtccttttttaaagcacatctcagattaaaaaaaaaaaaaaaaaaaaaaaagggggggcngcnt

SEQ ID NO: 235 - DNA, 2143 bp, Homo sapiens
  SITE (2058): n equals a,t,g, or c
  SITE (2080): n equals a,t,g, or c
  SITE (2115): n equals a,t,g, or c
  SITE (2132): n equals a,t,g, or c
tcgacccacgcgtccggttgaattccttgacctgcaaacacatatttattagcctgactcaaacaatgaagctattaaaacttcggaggaacattgtaaaactctctttgtatcggcatttcaccaacacgcttattttggcagtggcagcatccattgtgtttatcatctggacaaccatgaagttcagaatagtgacatgtcagtcggactggcgggagctgtgggtagacgatgccatctggcgcttgctgttctccatgatcctctttgtcatcatggttctctggcgaccatctgcaaacaaccagaggtttgccttttcaccattgtctgaggaagaggaggaggatgaacaaaaggagcctatgctgaaagaaagctttgaaggaatgaaaatgagaagtaccaaacaagaacccaatggaaatagtaaagttaacaaagcacaggaagatgatttgaagtgggtagaagagaatgttccttcttctgtgacagatgtagcacttccagcccttctggattcagatgaggaacgaatgatcacacactttgaaaggtccaaaatggagtaaggaatgggaagatttgcagttaaagatggctaccatcagggaagagatcagcatctgtgtcagtcttctgtacggctccatgggattaaaggaagcaatgacatcctgatctgttccttgatctttgggcattggagttggcgagaggtgtcagaacaaagagaacatcttactgaaaacaagttcataagatgagaaaaatctacgagcttcttatttacaacactgctgccccctttcctcccagactctgacatggatgttcatgcaacttaagtgtgttgttcctgaactttctgtaatgtttcattttttaaatctgacaaactaaaaagtttaacgtcttctaaaagattgtcatcaacaccataatatgtaatctccaggagcaactgcctgtaatttttatttatttagggagttacataggtgatgggggaaattgttaactacctttcattttcctgggaagtcaaggttacatcttgcagaggttgttttgagaaaaaagggcccttctgagttaaggagccatagttctatcaatgatcaaaagaaaaaaaaaaaaaagagaaactgttacagtatgattcagatcatttaaaaaagcaaaatcaagtgcaattttgtttacaaatggtgtatattaaagatttttctatttcagatgtactttaaagagaaatattagcttaactcttttgacatctgctattgtgacacatcccattgctggcaatgtggtgcacactccgaaacttttaactactgttttgtaagcctccaagggtggcattgcagggtccttaggcaatgttttgtttgcctttatgcagagaggtgctccaagtgctgtgattgagcaccgtgctagaggaactgtaatgcttcagaagttgtagcttatacaaaggaaacaggtcctgctggcttaatttaaacagttattgcatgaagtagcgtggaggccctggactgctgctcgttctttaggatggactgttctggtatctggtattggtttagagactgttaataagggacatcacaaggtgatgggattcatttgaagcactctatttctgttttaatggttttatccaattttgccttcccaagatttttgttctacataaaaagttcatgccactttttaatataaaaaaatttaacaaaattaatgtatttttctcatttttttcaaactttttctaaagactctttctgtcaaactcatgaaaaatttctttctatggcttttattctagattgtcttattttctgttaaaaccaatgaccacatgaccacaatcttcactaactcatactgcagtgaaagtgttaacccttaggtagtttctctacaactctttgctatggtgatttttaaaaaagtttcctagggaagtatctctgagggaacaggcaatctgaaggaactgactatattctccatggctaagtccattaggccaaaagnctgggtgggtattggttgtcangctgtctattggcatattaaaaacgtaggccgganggaataattaggttgtnatgccggcggg

SEQ ID NO: 236 - DNA, 1133 bp, Homo sapiens
  SITE (528): n equals a,t,g, or c
  SITE (552): n equals a,t,g, or c
  SITE (1133): n equals a,t,g, or c
ggcacagcttggaatgaacccctgtggataagggggactattagatagaataaacatcaataaatgcttgatgaataaacgctaatcctaccttcccagcctgacacctcccagtggacaccacacttcacttgaagccttagaaacctttcccacccatgcttccagccctggcttcatgttgccatttctcacccccagaacaggccgcccgcctgaagaaactacaagagcaagagaaacaacagaaagtggagtttcgtaaaaggatggagaaggaggtgtcagatttcattcaagacagtgggcagatcaagaaaaagtttcagccaatgaacaagatcgagaggagcatactacatgatgtggtggaagtggctggcctgacatccttctcctttggggaagatgatgactgtcgctatgtcatgatcttcaaaaaggagtttgcaccctcagatgaagagctagactcttaccgtcgtggagaggaatgggacccccagaaggctgaggagaagcggaacntgaaggagctggcccagaggcaangaggaggaggcagcccagcaggggcctgtggtggtgagccctgccagcgactacaaggacaagtacagccacctcatcggcaagggagcagccaaagacgcagcccacatgctacaggccaataagacctacggctgtktgcccgtggccaataagagggacacacgctccattgaagaggctatgaatgagatcagagccaagaagcgtctgcggcagagtggggaagagttgccgccaacctcctaggcgccccgcccagctccctttgacccctggggcagggcagggggcagggagagacaaggctgctgctattagagcccatcctggagccccacctctgaaccacctcctaccagctgtccctcaggctgggggaaaacaggtgtttgatttgtcaccgttggagcttggatatgtgcgtggcatgtgtgtgtgtgtgtgagagtgtgaatgcacaggtgggtatttaatctgtattattccccgttcttggaattttcttcccatggggctggggtactttacattcaataaatactgtttaacccaaaaaaaaaaaaaaaaaagaaagaagn

SEQ ID NO: 237 - DNA, 1025 bp, Homo sapiens
cctggcccacattgcttcattggcctggccatgcgcctgtactatggcagccgctagtccctgacaacttccaccctgattccggaccctgtagattgggcgccaccaccagatccccctcccaggccttcctccctctcccatcagcagccctgtaacaagtgccttgtgagaaaagctggagaagtgagggcagccaggttattctctggaggttggtggatgaaggggtaccctaggagatgtgaagtgtgggtttggttaaggaaatgcttaccatcccccacccccaaccaagttcttccagactaaagaattaaggtaacatcaatacctaggcctgagaaataaccccatccttgttgggcagctccctgctttgtcctgcatgaacagagttgatgaaagtggggtgtgggcaacaagtggctttccttgcctactttagtcacccagcagagccactggagctggctagtccagcccagccatggtgcatgactcttccataagggatcctcacccttccactttcatgcaagaaggcccagttgccacagattatacaaccattacccaaaccactctgacagtctcctccagttccagcaatgcctagagacatgctccctgccctctccacagtgctgctccccacacctagcctttgttctggaaaccccagagagggctgggcttgactcatctcagggaatgtagcccctgggccctggcttaagccgacactcctgacctctctgttcaccctgagggctgtcttgaagcccgctacccactctgaggctcctaggaggtaccatgcttcccactctggggcctgcccctgcctagcagtctcccagctcccaacagcctggggaagctctgcacagagtgacctgagaccaggtacaggaaacctgtagctcaatcagtgtctctttaactgcataagcaataagatcttaataaagtcttctaggctgtagggtggttcctacaaccacagccaaaaaaaaaaaaaa

SEQ ID NO: 238 - DNA, 1400 bp, Homo sapiens
ggcacagtttattaatacctattatgggaaagtcactttggttggcattgaaaattacatcatctttaaagcagtatttgtccccagatggactcatcactagcaaagactaggttcattggaaggcatagggtgagagaatgggaagatgragtggaggcgggttgttaaagtgctgtcagtgagtgattttgtctacttgaataatggtccatgtttgggggcatattgtgtttcataagaagtgaaaggtatttgcaaagtaagctacaaatgacccataaatctgttaacaacagtccttaatatgcaaagatgaaaaacaagcattactgctacccaaagggaactggtgcttggtgatgtgcagatggggctgttggttaagagagctattacaggttttctctcttaggtttcataggaggtagttactgagatgagattgttttatctttttgaatacagatctcttgtcttgagttagttctgaggatgggagtaataaaggagttttttgtttttttgtttgtttgtttgttttggctccttagtaatactcctctgacatttatttctattattcttcaaagaaaggaaaccaactgaaatgtttgctttaacaaacattttaataagttctctgggtttttttttccccttttaaaaaaattagcatataccatagcaataaaagaactaatgttaactattgtatgctacaacttaagtgatttttctaaagaagcacaatgtcattgraagtattattgaaaaggatcatagtcacattgaatttgtgaaggccaaagaaattgaagggagtgatattttcattttatgatattcacatatttagtaaattttgtgtacaagaataccaggcagagtgttttacccatggaaacaggtttcagattactttgtttttactgttagagtctcaagtttagaaatgctaacacttaaatcagtttttttctcactatacttgaagattgttaatattttgatatcttcctagcttgatggaatttaaacatatcttcagatctgtgacagtgacagccaataggactgataatattagcttcaaaccaataatatccagggttaaaataaaaatcatagtgaaagtacgattgtaaaattatgctatattaacttttaagtctgtaataacttgacatcaaaatgttatgtaattaccataaataatggctagcgagaacatctttggaaattctcaaattacctttcttactacactgtttgcagaatgaatgtagaaatgatcctgttagctttctgaatgttctgtggttgaatgtgtttttgcttaaataaagcttttggtatttgtttaaatwacaaaaaaaaaaaaaaaaaaaaaaactcga

SEQ ID NO: 239 - DNA, 1250 bp, Homo sapiens
gcccacgcgtccgcccacgcgtccggcggtgcggagtatggggcgctgatggccatggagggctactggcgcttcctggcgcygctggggtcggcactgctcgtcggcttcctgtcggtgatsttcgccctcgtctgggtcctccactaccgagaggggcttggctgggatgggagcgcactagagtttaactggcacccagtgctsatggtcaccggcttcgtcttcatccagggcatcgcatcatcgtctacagactgccgtggacctggaaatgcagcaagctcctgatgaaatccatccatgcagggttaaatgcagttgctgccattcttgcaattatctctgtggtggccgtgtttgagaaccacaatgttaacaatatagccaatatgtacagtctgcacagctgggttggactgatagctgtcatatgctatttgttacagcttctttcaggtttttcagtctttctgcttccatgggctccgctttctctccgagcatttctcatgcccatacatgtttattctggaattgtcatctttggaacagtgattgcaacagcacttatgggattgacagagaaactgattttttccctgagagatcctgcatacagtacattcccgccagaaggtgttttcgtaaatacgcttggccttctgatcctggtgttcggggccctcattttttggatagtcaccagaccgcaatggaaacgtcctaaggagccaaattctaccattcttcatccaaatggaggcactgaacagggagcaagaggttccatgccagcctactctggcaacaacatggacaaatcagattcagagttaaacartgaagtagcagcaaggaaaagaaacttagctctggatgaggctgggcagagatctaccatgtaaaatgttgtagagatagagccatataacgtcacgtttcaaaactagctctacagttttgcttctcctattagccatatgataattgggctatgtagtatcaatatttactttaatcacaaaggatggtttcttgaaataatttgtattgattgaggcctatgaactgacctgaattggaaaggatgtgattaatataaataatagcagatataaattgtggttatgttacctttatcttgttgaggaccacaacattagcacggtgccttgtgcakaatagatactcaatatgtgaatatgtgtctactagtagttaattggataaactggcagcatccctga

SEQ ID NO: 240 - DNA, 1307 bp, Homo sapiens
  SITE (651): n equals a,t,g, or c
  SITE (1064): n equals a,t,g, or c
ggcacgagagaaaagaggttgagaatgttttctagcaggcagaatgtgcatacatgttttcatgartgtcctttgggtgctgtttcttttaaatcctctgtgcacagggctctggcctttartaaactgtttttctgtcttacgtcatgctgactgggtgctaggggctgattacaaaggggaagagttgaacagacatcaggggccgatgaaaccaaaggactaggagtcaggagaacaagtcagggattaggagacagcggtttggtttattgttatccagctggaggactcctaggggcagcagcaggaggaataccagggccacggaggggcaggagtctcacagtggagggcagactctaacagatgccagctgaacgctcgctggccctggatgtcatacgagttggggaccagaaatctgggctcagagaacccgtccagggagatttgaagccatgggttatcttctagagttgatactgataatatattttaatttttattgatgtttaataccttctgaaacaggagggtaagatcagatgggaagcccytctgttgaaggatcttgggaaccttggtggttttttttttttggtttttttttttttgatcgagctgtggacatccttcttaattcgattntgaggatttgtttaactaaaaagttcccaaacacagaaagggcctccccacctgctttggggagctgtctgtsctgggagtgccaggcatccsatgggacccatcactgccagtgtctgtgcctcccagaggtcagccctgtgtctgccctggctctgtctcctctgtgacagggcagagcatttctggtcagtttctccatggtgcctcccacccctttgtaaagtggatggacatgatggaattcagttgtctcaccctgatagcctgggtgttgatattcactttacccgcactcagacacaggcgaccttgaagcagttctcggtgtgtagagtccacgtgacagtccccacagcctccccagatagctgtgtgcctgtgcgctactgctgtgccattttcccaacttnggcgtttcactaaatgcagctgatctctctctctgtgcactcgtgatccatgttgaacaatacatgtaggttctttttccacgcaatgtaagaacatgatatactgtacgttggaaagcatttaccttatttatatacctgaatgttcctactacacaaataaacatatattaaatwctaaaaaaaaaaaaaaaaactggagggggggcccggtacccaaatcgccggatagtgatcgtaaac

SEQ ID NO: 241 - DNA, 888 bp, Homo sapiens
  SITE (830): n equals a,t,g, or c
ctgttagaatgcccagtttacctggatggcaacccaacagtgctcctgcccacctgcccctcaatcctcctagaattcagcccccaattgcccagttaccaataaaaacttgtacaccagccccagggacagtctcaaatgcaaatccacagagtgasmcaccacctcgggtagaatttgatgacaacaatccctttagtgaaagttttcaagaacgggaacgtaaggaacgtttacgagaacagcaagagagacaacggatccaactcatgcaggaggtagatagacaaagagctttgcagcagaggatggaaatggagcagcatggtatggtgggctctgagataagtagtagtaggacatctgtgtcccagattcccttctacagttccgacttaccttgtgattttatgcaacctctaggaccccttcagcagtctccacaacaccaacagcaaatggggcaggttttacagcagcagaatatacaacaaggatcaattaattcaccctccacccaaactttcatgcagactaatgagcgaggcaggtaggccctccttcatttgttcctgattcaccatcaatccctgttggaagcccaaatttttcttctgtgaagcagggacatggaaatctttctgggaccagcttccagcagtccccagtgaggccttcttttacacctgctttaccagcagcacctccagtagctaatagcagtctcccatgtggccaagattctactataacccatggacacagttatccgggatcaacccaatcgctcattcagttgtattctgatataatcccagaggaaaaagggnaaaaaaaaraamaaraaaraaraaaggagatgatgatgcagaattccaccaaggctcc

SEQ ID NO: 242 - DNA, 1811 bp, Homo sapiens
  SITE (2): n equals a,t,g, or c
  SITE (4): n equals a,t,g, or c
  SITE (16): n equals a,t,g, or c
  SITE (1810): n equals a,t,g, or c
  SITE (1811): n equals a,t,g, or c
cngncagtaccggtcngattcccgggtcgacccacgcgtccgctgcattccagggcctttcagtggctttcattctgaagttcctggataacatgttccatgtcttgatggcccaggttaccastgtcattatcacaacagtgtctgtcctggtctttgacttcaggccctccctggaatttttcttggaagccscatcagtcstyctctctatatttatttataatgccagcaagcctcaagttccggaatacgcacctaggcaagaaaggatccgagatctaagtggcaatctttgggagcgttccagtggggatggagaagaactagaaagacttaccaaacccaagagtgatgagtcagatgaagatactttctaactggtacccacatagtttgcagctctcttgaaccttattttcacattttcagtgtttgtaatatttatcttttcactttgataaaccagaaatgtttctaaatcctaatattctttgcatatatctagctactccctaaatggttccatccaaggcttagagtacccaaaggctaagaaattctaaagaactgatacaggagtaacaatatgaagaattcattaatatctcagtacttgataaatcagaaagttatatgtgcagattattttccttggccttcaagcttccaaaaaacttgtaataatcatgttagctatagcttgtatatacacatagagatcaatttgccaaatattcacaatcatgtagttctagtttacatgccaaagtcttccctttttaacattataaaagctaggttgtctcttgaattttgaggccctagagatagtcattttgcaagtaaagagcaacgggaccctttctaaaaacgttggttgaaggacctaaatacctggccataccatagatttgggatgatgtagtctgtgctaaatattttgctgaagaagcagtttctcagacacaacatctcagaattttaatttttagaaattcatgggaaattggatttttgtaataatcttttgatgttttaaacattggttccctagtcaccatagttaccacttgtattttaagtcatttaaacaagccacggtggggcttttttctcctcagtttgaggagaaaaatcttgatgtcattactcctgaattattacattttggagaataagagggcattttattttattagttactaattcaagctgtgactattgtatatctttccaagagttgaaatgctggcttcagaatcataccagattgtcagtgaagctgatgcctaggaacttttaaagggatcctttcaaaaggatcacttagcaaacacatgttgacttttaactgatgtatgaatattaatactctaaaaatagaaagaccagtaatatataagtcactttacagtgctacttcacacttaaaagtgcatggtatttttcatggtattttgcatgcagccagttaactctcgtagatagagaagtcaggtgatagatgatattaaaaattagcaaacaaaagtgacttgctcagggtcatgcagctgggtgatgatagaagagtgggctttaactggcaggcctgtatgtttacagactaccatactgtaaatatgagctttatggtgtcattctcagaaacttatacatttctgctctcctttctcctaagtttcatgcagatgaatataaggtaatatactattatataattcatttgtgatatccacaataatatgactggcaagaattggtggaaatttgtaattaaaataattattaaacctaaaaaaaaaann

SEQ ID NO: 243 - DNA, 2271 bp, Homo sapiens
  SITE (553): n equals a,t,g, or c
  SITE (2267): n equals a,t,g, or c
  SITE (2269): n equals a,t,g, or c
  SITE (2271): n equals a,t,g, or c
ctgacctcatggcgtagagcctagcaacagcgcaggctcccagccgagtccgttatggccgctgccgtcccgaagaggatgagggggccagcacaagcgaaactgctgcccgggtcggccatccaagcccttgtggggttggcgcggccgctggtcttggcgctcctgcttgtgtccgccgctctatccagtgttgtatcacggactgattcaccgagcccaaccgtactcaactcacatatttctaccccaaatgtgaatgctttaacacatgaaaaccaaaccaaaccttctatttcccaaatcagcaccaccctccctcccacgacgagtaccaagaaaagtggaggagcatctgtggtccctcatccctcgcctactcctctgtctcaagaggaagctgataacaatgaagatcctagtatagaggaggaggatcttctcatgctgaacagttctccatccacagccaaagacactctagacaatggcgattatggagaaccagactatgactggaccacgggccccagggacgacgacgagtctgatngacaccttggaagaaaacaggggttacatggaaattgaacagtcagtgaaatcttttaagatgccatcctcaaatatagaagaggaagacagccatttcttttttcatcttattatttttgctttttgcattgctgttgtttacattacatatcacaacaaaaggaagatttttcttctggttcaaagcaggaaatggcgtgatggcctttgttccaaaacagtggaataccatcgcctagatcagaatgttaatgaggcaatgccttctttgaagattaccaatgattatattttttaaagcactgtgatttgaatttgcttatgtaattttatttgcttgactttttatatgatattgtgcaaatgtttgccataggcaattggtacttaaatgagaggtgagtctctcttttgccttggtgctttggaaattaaatgtcacaaacgagtatataattttttatctgtacttttagagctgagtttaatcaggtgtccaaaatgtgagttaaacattaccttatatttacactgttagtttttattgttttagatttattatgcttcttctggaagtattagtgatgctacttttaaaagatcccaaacttgtaactaaattctgacatatctgttactgctgactcacattcattctccgccattcaaatactattttttatccacatttttttttgttcccaaactgtaatgtacaaggatatgtgtgataatgctttggatttgagtaatatttttttttcttccaagaaaactgctttggatatttttagataatttaaacataatttaggataatgatattgctcaatctgaccacaattttaggtaaaacattaaatgtgtcaagaaatcttggcaacagagactctgcagcttgcagtggacatagataaaatgttacagagatactatttttttggttggaattactatattaaatttagaagcagaaactggtaaaatgttaaatacatgtacaattgcttttagttagcaattgattgtagcatgggttcctccaaggtttcaagcaatgggcagagtttaaaattatatcagattcgtttacttcgtttattattttacagtaaatttgaataaatcttaggggtcattatcacttaaataatactgtacctaggtctttcaaattaaaattatacctgaatgaagttgtttgtatacataaaggatatttgtgtacaattaccttttttcccccacacttgttttctttgtttttgttttttatggcaactggaaagtatttactatgggattcatttatgtctgtctttctatcataaagaattgatcaatatgtaaatatgtgatttgaaccatggttgacttacaagtgtcactacagctttttagaaaacatagccctaatatatgttaagcaggacccgggtgagccagtgggcttgcgctttatgtagagctggaagaaggccgtccatcctgtctcttgggcggacagtgtactttcctaatagggaagggaagcacaatggaaatacccctgaaccgttttattgcagtaatttttttcatatctgaaactattatttaatattttgaataagattttaaaaaataaatggcaaagatataaatctaaaaaaaaaaaaaaaaaaaaaaaaaaaaaaaaaaaaaaaaaaaaaaaaaaaaaaaaaaaaaaaaananan

SEQ ID NO: 244 - DNA, 2500 bp, Homo sapiens
  SITE (2459): n equals a,t,g, or c
  SITE (2473): n equals a,t,g, or c
  SITE (2475): n equals a,t,g, or c
  SITE (2478): n equals a,t,g, or c
tccaagctacgccactcgggctggggcgttgggagcgggagtgcagagcgtggtcgtggcggcggcggtgagaagagcgaggcgkaggagggggtgccatggccgggcagcagttccagtacgatgacagtgggaacaccttcttctacttcctcacctccttcgtggggctcatcgtgatcccggcgacatactacctctggccccgagatcagaatgccgagcaaattcgattaaagaatatcagaaaagtatatggaaggtgtatgtggtacgtttacggttattaaaaccccagccaaatattattcctacagtaaagaaaatagttctgcttgcaggatgggcattgttcttattccttgcatataaagtttccaaaacagaccgagaataccaagaatacaatccttatgaagtattaaatttggatcctggagccacagtagcagaaattaaaaaacaatatcgtttgctgtcacttaaatatcatccagataaaggaggtgatgaggttatgttcatgaggatagcaaaagcttatgctgctttaacggatgaagagtcccggaaaaattgggaagaatttggaaatccagatgggcctcaagccacaagctttggaattgccctgccagcttggatagttgaccagaaaaattcaattctggttttacttgtatatggattggcatttatggttatccttccagttgttgtgggctcttggtggtatcgctcaatacgctatagtggagaccagattctaatacgsacaacacagatttatacatactttgtttataaaacccgaaatatggatatgaaacgtcttatcatggttttggstggagcttctgaatttgatcctcagtataataaagatgccacaagcagaccaacggataatattctaataccacagctaatcagagaaattggcagcattaatttaaagaagaatgagcctccacttacctgcccatatagcctgaaggccagagttcttttactgtctcatcttgctagaatgaaaattcctgagacccttgaagaagatcagcaattcatgctaaaaaagtgtcctgccctacttcaagaaatggttaatgtaatctgccaactaatagtaatggcccggaaccgtgaagaaagggagtttcgtgctccaactttggcatccctagaaaactgcatgaagctttctcagatggccgttcagggacttcagcaatttaagtctccccttctgcagctccctcatattgaagaggacaatcttagacgggtttctaatcataagaagtataaaattaaaactatccaggatttggtgagtttaaaagaatcagatcgtcacactctactgcacttccttgaagatgaaaaatatgaagaggttatggctgtccttgggagttttccatatgtgaccatggatataaaatcacaggtgttagatgatgaagatagcaacaacatcacagtaggatccttagttacagtgttggttaagttgacaaggcaaacaatggctgaagtatttgaaaaggagcagtccatctgtgctgcagaggaacagccagcagaagatgggcagggtgaaactaacaagaacaggacaaaaggaggatggcaacagaagagtaaaggacccaagaaaactgctaaatcaaaaaaaaagaaacctttaaaaaaaaaacctacacctgtgctattaccacagtcaaagcaacagaaacaaaagcaggcaaatggagtcgttgggaatgaagctgcagtaaaggaagatgaagaagaagtttcagataagggcagtgattctgaagaagaagaaaccaatagagattcccaaagtgagaaagatgatggtagtgacagagactctgatagagagcaagatgaaaaacaaaacaaagatgatgaagcagagtggcaagaattacaacaaagcatacagcgaaaagagagagctctattggaaaccaaatcaaaaataacacatcctgtgtatagcctttactttcctgaggaaaaacaagaatggtggtggctttacattgcagataggaaggagcagacattaatatccatgccatatcatgtgtgtacgctgaaagatacagaggaggtagagctgaagtttcctgcaccaggcaagcctggaaattatcagtatactgtgtttctgagatcagactcctatatgggtttggatcagattaaaccattggaagttkggaagttcatgaggctgaagcctgtgccagaaaatcacccacagtgggatacagcaatagagggggatgaagaccaggaggacagtgagggctttgaagatagctttgagggaggaagagggagggaggaaggaaggtggtggacttaaggcagttactctggaatgggacccacagtgttttgcaccatattttggcaattttttttgcccgtttttnggaagtgttttccntnaancccaggaaccattacagaaccg

SEQ ID NO: 245 - DNA, 1338 bp, Homo sapiens
  SITE (133): n equals a,t,g, or c
  SITE (867): n equals a,t,g, or c
  SITE (1338): n equals a,t,g, or c
cttccggttctccgggcagctgccactgctgtagcttctgccacctgccacgaccgggcctctccctggcgtttggtcacctctgcttcattctccaccgcgcctatggtccctcttggagccagcgtggcgngcctggcggctcccgggtggtgagagagcggtccgggaacgatgaaggcctcgcagtgctgctgctgtctcagccacctcttggcttccgtcctcctcctgctgttgctgcctgaactaagcgggyccctggmagtcctgctgcaggcagccgaggccgcgccaggtyttgggcctcctgaccctagaccaggacattaccgccgctgccaccgggccctwacccctgcccagcagccgggccgtggtctggctgaagctgcgggggccgcggggctccgagggaggcaatggcagcaaccctgtggccgggcttgagacggacgatcacggagggaaggccggggaargctcggtgggtggcggccttgctgtgagccccaaccctggcgacaagcccatgacccagcgggccctgaccgtgttgatggtggtgagcggcgcggtgctggtgtacttcgtggtcaggacggtcaggatgagaagaagaaaccgaaagactaggagatatggagttttggacactaacatagaaaatatggaattgacacctttagaacaggatgatgaggatgatgacaacacgttgtttgatgccaatcatcctcgaagataagaatgtgccttttgatgaaagaactttatctttctacaatgaagagtggaatttctatgtttaaggaataagaagccactatatcaatgttgggggggtatttaagttacatatatttnaacaacctttaatttgctgttgcaataaataccgtatccttttattatatctttatatgtatagaagtactctgttaatgggctcagagatgttggggataaagtatactgtaataatttatctgtttgaaaattactataaaacggtgttttctgrtcggtttttgtttcctgcttaccatatgattgtaaattgttttatgtattaatcagttaatgctaattatttttgctgatgtcatatgttaaagagctataaattccaacaaccaactggtgtgtaaaaataatttaaaatytcctttactgaaaggtatttcccatttttgtggggaaaagaagccaaatttattactttgtgttggggtttttaaaatattaagaaatgtctaagttattgtttgcaaaacaataaatatgattttaaattctcttaaaaaaaaaaaaaaaaaccccgggggggggcccggn

SEQ ID NO: 246 - DNA, 654 bp, Homo sapiens
  SITE (651): n equals a,t,g, or c
gaattcggcacgaggcagcttgtgctttaaaggaggtgttcaaagcatgtctgagcagagacttttgggctctgttttaattaatactttaaaataattcatatttaaaatatcaratgtttccataaagaggaggatgtttaaatgcctccagactacattcctttttattscttgattttacctgggagtccaaagttcaattcccataaagcaagcgttttatttgtcactttcaatatacatccgattgccatgcttaagatgcaatatgggctgcggaaataggttaacccacaggctcccagggcccagtgtagaaggtgagagattcgtgtaaaatgattcaaataaaaggaagaccctggccgggtgccgtarctcacgcctgtaatcccagcactttgggaggccgaagcgagtggatgacgaggttaggagttggagaccagcctggccaacatcgtgaaaccccgtctctactaaaaatacaaaaattagccgggcatggtggcaggcacctgtaatcctagctagttgggaggctgaggcaggagaatcgtttgaatctgggagttggaggttgtcagtgagctgagatcgcgccacagcactccagcctgggtgacagggtgagactctgtctcaaanaga

SEQ ID NO: 247 - DNA, 1146 bp, Homo sapiens
  SITE (20): n equals a,t,g, or c
  SITE (35): n equals a,t,g, or c
  SITE (36): n equals a,t,g, or c
  SITE (37): n equals a,t,g, or c
aaaaaaaacccaggggaacnttgggggccgctttnnnttccccctccaggccattggggaattcttcaagttaatcctgctttgctcttggccaacagggcttgtaggggggagagacccaggatcatcaaggggttcgagtgcaagcctcactcccagccctggcaggcagccctgttcgagaagacgcggctactctgtggggcgacgctcatcgcccccagatggctcctgacagcagcccactgcctcaagccccgctacatagttcacctggggcagcacaacctccagaaggaggagggctgtgagcagacccggacagccactgagtccttcccccaccccggcttcaacaacagcctccccaacaaagaccaccgcaatgacatcatgctggtgaagatggcatcgccagtctccatcacctgggctgtgcgacccctcaccctctcctcacgctgtgtcactgctggcaccagctgyctcatttccggctggggcagmacgtccagcccccagttacgcctgcctcacaccttgsgatgcgccaacatcaccatcattgagcaccagaagtgtgagaacgcctaccccggcaacatcacagacaccatggtgtgtgccagcgtgcaggaagggggcaaggactcctgccagggtgactccgggggccctctggtctgtaaccagtctcttcaaggcattatctcctggggccaggatccgtgtgcgatcacccgaaagcctggtgtctacacgaaagtctgcaaatatgtggactggatccaggagacgatgaagaacaattagactggacccacccaccacagcccatcaccctccatttccacttggtgtttggttcctgttcactctgttaataagaaaccctaagccaagaccctctacgaacattctttgggcctcctggactacaggagatgctgtcacttaataatcaacctggggttcgaaatcagtgagacctggattcaaattctgccttgaaatattgtgactctgggaatgacaacacctggtttgttctctgttgtatccccagccccaaagacagctcctggccatatatcaaggtttcaataaatatttgctaaatgaaaaaraaaaaaaaaaaaaactcga

SEQ ID NO: 248 - DNA, 1443 bp, Homo sapiens
  SITE (776): n equals a,t,g, or c
  SITE (907): n equals a,t,g, or c
  SITE (1288): n equals a,t,g, or c
ataaactgaaataggtcatgcaaatataaaatattatttttaaattatttgtcataagaaacgatggtggccatattttgctttaataatggaaaaaatgtggttagcattctktggaaggtggtcatcagatagtagacattttctaggatttatttctacctgcatatgtggaaatgtgtactactttagatttatwtaatggcagctaactcagaggcatcaaaatgtgctaatggtgtaatatggcctttgtcttgctgtyctgttttgtargccttcaatcaagcargggcagggccgtacagtgaacttgtcctttgscagacgccagcgtctgcccctgaccccgtctccactctctgtgtcctggaggaggagccccttgatgcytaccctgattcaccttctgcgtgccttgtactgaactgggaagagccgtgcaataacggatctgaaatccttgcttacaccattgatctaggagacactagcattaccgtgggcaacaccaccatgcatgttatgaaagatctccttccagaaaccacctaccggtgagtgcaagggagtagaaatctgcatcagcacatcagcacttggggatctaagtaaacctctcggggaaaatgaccaagtggatgtcatctcccagctgtttctaagagcccagatgtccagagtattgtctcaccttgatccctcaggccagaagacctgtgaaaaagccacactggttcagggactcactggacggttttgtgtccactytaacntgcaccgtctctaccccagagtggactcaratcctcaagtcatcctctgaacattgrrgtcagaaattataaaagggctttggcaatatgttagcccaagaatttggcttcttccagaaattgtgccgacnttaacagtggcttaaatgatggtaaaacttttaagatttctaaaaggrtggcattggagatacgttgacttttattaaacmacctatagttgtttaatgayttctaaaaaaatatctggagctcaggggttcaactgagggaacacatgttgagratcattgtttactaattaaatgccaggtaacccgttgaaattatcaaaaacatcttccacgtaccagaaagcacctcagaggatagttctgttatggagaagatgaaatggtttagtagtgtaggaactatggaaaggtgagcttagatttggatagtaaaacctcaagaccctatttaaaaagtattttatgaatgcagcataaataatttaattcagtgttaanatgccaaggctagtatattgagctgaatgtgaaaagaaactcacattgggagaatgccaccttttccttataagatagctttgaagataccattttagacagatggaaattgaatagctttagaaaaggcaaatgtttgatcttggggaaaaaaa

SEQ ID NO: 249 - protein, 31 aa, Homo sapiens
  SITE (31): Xaa equals stop translation
MLSTGIEVARPPATLLGLMFVLTGMPRGLRX

SEQ ID NO: 250 - protein, 116 aa, Homo sapiens
  SITE (36): Xaa equals any of the naturally occurring L-amino acids
  SITE (78): Xaa equals any of the naturally occurring L-amino acids
  SITE (116): Xaa equals stop translation
MNVVIVIILFSFDSVGTMFSCNRIPKITVLNKLKFXCEVLLRIQTIQGFYRCTRISRYKGIFPDFCQSQCMGCNPESXMAVPALVTPILAHRKKEKGMCLFTLIIAPTRCTHYFCX

SEQ ID NO: 251 - protein, 103 aa, Homo sapiens
  SITE (103): Xaa equals stop translation
MSSAKIVRQRGAVPTYYTTEAGEIIFLVLNWSLSILHIVDVLCSKPEKSVTEDAASGLSQRMTALVWRKGPDGGSRKPILLLFFFLPLILCFHSFIHSSNICX

SEQ ID NO: 252 - protein, 42 aa, Homo sapiens
  SITE (7): Xaa equals any of the naturally occurring L-amino acids
  SITE (13): Xaa equals any of the naturally occurring L-amino acids
  SITE (22): Xaa equals any of the naturally occurring L-amino acids
MILFPQXALRLGXWPRTWSILXKYSVNFFSAYSPMGAVGTEF

SEQ ID NO: 253 - protein, 37 aa, Homo sapiens
  SITE (32): Xaa equals any of the naturally occurring L-amino acids
  SITE (37): Xaa equals stop translation
MIILLLFMLLNNVVLVQEDNCQRKNTVQERRXWSQWX

SEQ ID NO: 254 - protein, 128 aa, Homo sapiens
  SITE (4): Xaa equals any of the naturally occurring L-amino acids
  SITE (12): Xaa equals any of the naturally occurring L-amino acids
  SITE (128): Xaa equals stop translation
MAAXPPGCTPPXLLDISWLTESLGAGQPVPVECRHRLEVAGPRKGPLSPAWMPAYACQRPTPLTHHNTGLSELLEHGVCEEVERVRRSERYQTMKVRRAGLGPTPGMSCPGNDNTVHTMHGEANRGSX

SEQ ID NO: 255 - protein, 67 aa, Homo sapiens
  SITE (8): Xaa equals any of the naturally occurring L-amino acids
  SITE (67): Xaa equals stop translation
MSILCCPXLCLFFSFCISSGSCPFSHVSQLSFIATFSQSSPVLLVPAYNTYLSFLAFLDCASLTSTX

SEQ ID NO: 256 - protein, 69 aa, Homo sapiens
  SITE (69): Xaa equals stop translation
MSTFQLLLLILAQSTYKIKSKPLHMTNHTLLNSPGLNPSSPTLNFKTQQHESVSYACCHMRSLHHAFAX

SEQ ID NO: 257 - protein, 44 aa, Homo sapiens
  SITE (36): Xaa equals any of the naturally occurring L-amino acids
  SITE (37): Xaa equals any of the naturally occurring L-amino acids
  SITE (44): Xaa equals stop translation
MVSVVLIFSFLSLTISTTASAYNGNDTQGWNDKFHXXSVKTQTX

SEQ ID NO: 258 - protein, 51 aa, Homo sapiens
  SITE (51): Xaa equals stop translation
MISDAGAGFGVFLLVPRAGHCWGAGKPLPSCPSVASIPSWVLPSFLERGRX

SEQ ID NO: 259 - protein, 43 aa, Homo sapiens
  SITE (43): Xaa equals stop translation
MVQTIQDFLSLFSTPIFLLLLMFETLSLAPAWLKPLRVTSHSX

SEQ ID NO: 260 - protein, 61 aa, Homo sapiens
  SITE (61): Xaa equals stop translation
MILMPGLGTSRQRSVPFVPTLNASTPGAMTGPTATLTSCQWTTACRVSWANGWTSLRTFRX

SEQ ID NO: 261 - protein, 36 aa, Homo sapiens
  SITE (36): Xaa equals stop translation
MSHHAQPRFLLITMLLQEAKPVSNIPHLLESWYFGX

SEQ ID NO: 262 - protein, 38 aa, Homo sapiens
  SITE (38): Xaa equals stop translation
MNSLFWMILLPVSQDQVVEGLQGGFSQIHMRILRKHLX

SEQ ID NO: 263 - protein, 211 aa, Homo sapiens
  SITE (5): Xaa equals any of the naturally occurring L-amino acids
  SITE (211): Xaa equals stop translation
MSRSXDVTNTTFLLMAASIYLHDQNPDAALRALHQGDSLECTAMTVQILLKLDRLDLARKELKRMQDLDEDATLTQLATAWVSLATGGEKLQDAYYIFQEMADKCSPTLLLLNGQAACHMAQGRWEAAEGLLQEALDKDSGYPETLVNLIVLSQHLGKPPEVTNRYLSQLKDAHRSHPFIKEYQAKENDFDRLVLQYAPSAEAGPELSGPX

SEQ ID NO: 264 - protein, 548 aa, Homo sapiens
  SITE (548): Xaa equals stop translation
MEDSEALGFEHMGLDPRLLQAVTDLGWSRPTLIQEKAIPLALEGKDLLARARTGSGKTAAYAIPMLQLLLHRKATGPVVEQAVRGLVLVPTKELARQAQSMIQQLATYCARDVRVANVSAAEDSVSQRAVLMEKPDVVVGTPSRILSHLQQDSLKLRDSLELLVVDEADLLFSFGFEEELKSLLCHLPRIYQAFLMSATFNEDVQALKELILHNPVTLKLQESQLPGPDQLQQFQVVCETEEDKFLLLYALLKLSLIRGKSLLFVNTLERSYRLRLFLEQFSIPTCVLNGELPLRSRCHIISQFNQGFYDCVIATDAEVLGAPVKGKRRGRGPKGDKASDPEAGVARGIDFHHVSAVLNFDLPPTPEAYIHRAGRTARANNPGIVLTFVLPTEQFHLGKIEELLSGENRGPILLPYQFRMEEIEGFRYRCRDAMRSVTKQAIREARLKEIKEELLHSEKLKTYFEDNPRDLQLLRHDLPLHPAVVKPHLGHVPDYLVPPALRGLVRPHKKRKKLSSSCRKAKRAKSQNPLRSFKHKGKKFRPTAKPSX

SEQ ID NO: 265 - protein, 299 aa, Homo sapiens
MTTVPPSPRPMSRPSERNMRRPRGPSPLPASPRNSTPDEPDVHFSKKFLNVFMSGRSRSSSAESFGLFSCIINGEEQEQTHRAIFRFVPRHEDELELEVDDPLLVELQAEDYWYEAYNMRTGARGVFPAYYAIEVTKEPEHMAALAKNSDWVDQFRVKFLGSVQVPYHKGNDVLCAAMQKIATTRRLTVHFNPPSSCVLEISVRGVKIGVKADDSQEAKGNKCSHFFQLKNISFCGYHPKNNKYFGFITKHPADHRFACHVFVSEDSTKALAESVGRAFQQFYKQFVEYTCPTEDIYLE

SEQ ID NO: 266 - protein, 40 aa, Homo sapiens
  SITE (8): Xaa equals any of the naturally occurring L-amino acids
  SITE (40): Xaa equals stop translation
LLYLLKVXVIFVFSSSKGVTLVSMNLTSFFVSSVLACFSX

SEQ ID NO: 267 - protein, 594 aa, Homo sapiens
  SITE (99): Xaa equals any of the naturally occurring L-amino acids
MPASSLESRSFLLAKKSGENVAKFIINSYPKYFQKDIAEPHIPCLMPEYFEPQIKDISEAALKERIELRKVKASVDMFDQLLQAGTTVSLETTNSLLDXLCYYGDQEPSTDYHFQQTGQSEALEEENDETSRRKAGHQFGVTWRAKNNAERIFSLMPEKNEHSYCTMIRGMVKHRAYEQALNLYTELLNNRLHADVYTFNALIEATVCAINEKFEEKWSKILELLRHMVAQKVKPNLQTFNTILKCLRRFHVFARSPALQVLREMKAIGIEPSLATYHHIIRLFDQPGDPLKRSSFIIYDIMNELMGKRFSPKDPDDDKFFQSAMSICSSLRDLELAYQVHGLLKTGDNWKFIGPDQHRNFYYSKFFDLICLMEQIDVTLKWYEDLIPSAYFPHSQTMIHLLQALDVANRLEVIPKIWKDSKEYGHTFRSDLREEILMLMARDKHPPELQVAFADCAADIKSAYESQPIRQTAQDWPATSLNCIAILFLRAGRTQEAWKMLGLFRKHNKIPRSELLNELMDSAKVSNSPSQAIEVVELASAFSLPICEGLTQRVMSDFAINQEQKEALSNLTALTSDSDTDSSSDSDSDTSEGK

SEQ ID NO: 268 - protein, 131 aa, Homo sapiens
  SITE (131): Xaa equals stop translation
MKLNLCIPNWARCPLLLLFPQLLPFQGEDDDPLKAKAANLVEAVPWGIKAPSFQVTCLVRVQLQSCTPSRPSTLLATSQSPGRISCYSPLSHLPPVTTSIQPSPVMVPFQYQAFLLQVKEPAAQTLLGQQX

SEQ ID NO: 269 - protein, 21 aa, Homo sapiens
  SITE (14): Xaa equals any of the naturally occurring L-amino acids
  SITE (19): Xaa equals any of the naturally occurring L-amino acids
  SITE (21): Xaa equals stop translation
MRYHAQLIFCIFCXFVFVXKX

SEQ ID NO: 270 - protein, 159 aa, Homo sapiens
  SITE (109): Xaa equals any of the naturally occurring L-amino acids
  SITE (118): Xaa equals any of the naturally occurring L-amino acids
  SITE (122): Xaa equals any of the naturally occurring L-amino acids
  SITE (127): Xaa equals any of the naturally occurring L-amino acids
MTGTYSGQFVMEGFLNLKWSRFARVVLTRSIAIIPTLLVAVFQDVEHLTGMNDFLNVLQSLQLPFALIPILTFTSLRPVMSDFANGLGWRIAGGIWSYHLFHHMYFVVXYVRDLRHVXLYVXAAVVXRGLSGLCVLLGLAMFDCTGHVLPGLWAYGKHL

SEQ ID NO: 271 - protein, 219 aa, Homo sapiens
  SITE (219): Xaa equals stop translation
MHFLFRFIVFFYLWGLFTAQRQKKEESTEEVKIEVLHRPENCSKTSKKGDLLNAHYDGYLAKDGSKFYCSRTQNEGHPKWFVLGVGQVIKGLDIAMTDMCPGEKRKVVIPPSFAYGKEGYAEGKIPPDATLIFEIELYAVTKGPRSIETFKQIDMDNDRQLSKAEINLYLQREFEKDEKPRDKSYQDAVLEDIFKKNDHDGDGFISPKEYNVYQHDELX

SEQ ID NO: 272 - protein, 50 aa, Homo sapiens
  SITE (41): Xaa equals any of the naturally occurring L-amino acids
  SITE (48): Xaa equals any of the naturally occurring L-amino acids
  SITE (50): Xaa equals stop translation
MWVIRVFQKTFLFFVLFWSVHCISDKFGCLWHVCMKREGDXNCLSFSXLX

SEQ ID NO: 273 - protein, 122 aa, Homo sapiens
  SITE (7): Xaa equals any of the naturally occurring L-amino acids
  SITE (20): Xaa equals any of the naturally occurring L-amino acids
  SITE (122): Xaa equals stop translation
MPSQTEXFAACGGHSLLLVXLPLGLPFCPRAALCDLPFSLPSFPGQARRGGAEKQGAEGRGLQVKPRGQRTFQVSRTAPAAPRSRQPRPPAALPALGFGGRGVAKGRFLCFWCLYMLRIDQX

SEQ ID NO: 274 - protein, 88 aa, Homo sapiens
  SITE (53): Xaa equals any of the naturally occurring L-amino acids
  SITE (88): Xaa equals stop translation
MTAFCSLLLQAQSLLPRTMAAPQDSLRPGEEDEGMQLLQTKDSMAKGARPGAXRGRARWGLAYTLLHNPTLQVFRKTALLGANGAQPX

SEQ ID NO: 275 - protein, 26 aa, Homo sapiens
  SITE (26): Xaa equals stop translation
MIQVSVPLLTIMIFLLYLQIGPGKLX

SEQ ID NO: 276 - protein, 29 aa, Homo sapiens
  SITE (29): Xaa equals stop translation
MLLDPFILLFCLFSTAAQSCLEFIYIQFX

SEQ ID NO: 277 - protein, 44 aa, Homo sapiens
  SITE (14): Xaa equals any of the naturally occurring L-amino acids
  SITE (44): Xaa equals stop translation
MKFLSILLDDNNFXLMLMLAPFGCLAFERSMKMRNGALGLEEVX

SEQ ID NO: 278 - protein, 363 aa, Homo sapiens
  SITE (307): Xaa equals any of the naturally occurring L-amino acids
  SITE (363): Xaa equals stop translation
MRTLFNLLWLALACSPVHTTLSKSDAKKAASKTLLEKSQFSDKPVQDRGLVVTDLKAESVVLEHRSYCSAKARDRHFAGDVLGYVTPWNSHGYDVTKVFGSKFTQISPVWLQLKRRGREMFEVTGLHDVDQGWMRAVRKHAKGLHIVPRLLFEDWTYDDFRNVLDSEDEIEELSKTVVQVAKNQHFDGFVVEVWNQLLSQKRVTDQLGMFTHKEFEQLAPVLDGFSLMTYDYSTAHQPGPNAPLSWVRACVQVLDPKSKWRSKILLGLNFYGMDYATSKDAREPVVGARYIQTLKDHRPRMVWDSQXSEHFFEYKKSRSGRHVVFYPTLKSLQVRLELARELGVGVSIWELGQGLDYFYDLLX

SEQ ID NO: 279 - protein, 128 aa, Homo sapiens
  SITE (128): Xaa equals stop translation
LPTKILVKPDRTFEIKIGQPTVSYFLKAAAGIEKGARQTGKEVAGLVTLKHVYEIARIKAQDEAFALQDVPLSSVVRSIIGSARSLGIRVVKDLSSEELAAFQKERAIFLAAQKEADLAAQEEAAKKX

SEQ ID NO: 280 - protein, 54 aa, Homo sapiens
  SITE (54): Xaa equals stop translation
MLLQIHPLLPSPTIPHILLLFLYPTFSILEHSCSYCIEYLWVCLLFCLSLWFLX

SEQ ID NO: 281 - protein, 29 aa, Homo sapiens
MCLWCCGDVCSGLSSLLSLCVCCVVLAVC

SEQ ID NO: 282 - protein, 26 aa, Homo sapiens
  SITE (26): Xaa equals stop translation
EGLRLLLSLPAALPRSCCHPRWLPVX

SEQ ID NO: 283 - protein, 221 aa, Homo sapiens
MFHGIPATPGIGAPGNKPELYEEVKLYKNAREREKYDNMAELFAVVKTMQALEKAYIKDCVSPSEYTAACSRLLVQYKAAFRQVQGSEISSIDEFCRKFRLDCPLAMERIKEDRPITIKDDKGNLNRCIADVVSLFITVMDKLRLEIRAMDEIQPDLRELMETMHRMSHLPPDFEGRQTVSQWLQTLSGMSASDELDDSQVRQMLFDLESAYNAFNRFLHA

SEQ ID NO: 284 - protein, 40 aa, Homo sapiens [sequence omitted]

SEQ ID NO: 285 - protein, 49 aa, Homo sapiens
  SITE (6): Xaa equals any of the naturally occurring L-amino acids
  SITE (38): Xaa equals any of the naturally occurring L-amino acids
  SITE (49): Xaa equals stop translation
MQAPFXHFSFRMFSNLYCFSDFQPNISPCPLCHCILPXHHHVFLLLAVX

SEQ ID NO: 286 - protein, 52 aa, Homo sapiens
  SITE (52): Xaa equals stop translation
MKLVTMFDKLSRNRVIQPMGMSPRGHLTSLQDAMCETMEQQLSSDPDSDPDX

SEQ ID NO: 287 - protein, 32 aa, Homo sapiens
  SITE (32): Xaa equals stop translation
MAVGEAVFVPLQHPPLLHGSPIPKLLPGPLLX

SEQ ID NO: 288 - protein, 57 aa, Homo sapiens
  SITE (52): Xaa equals any of the naturally occurring L-amino acids
  SITE (57): Xaa equals stop translation
MNGCHRRKRLHLCKTIYLLWFVFSFLLSNEVVSSHWHILRAVQIICTLFHRXISAFX

SEQ ID NO: 289 - protein, 22 aa, Homo sapiens
  SITE (22): Xaa equals stop translation
MGWVSSPHVKRRECVLKKPFFX

SEQ ID NO: 290 - protein, 51 aa, Homo sapiens
  SITE (51): Xaa equals stop translation
MFNFFKNPLLTCLFISCYLYLSLLVNKVLFAEEGLCCTYCTTSNTGEGGVX

SEQ ID NO: 291 - protein, 98 aa, Homo sapiens
MVYIYHIFFIHSLLDGQLGWFHIFAIVSCAAPDIIFNSFAFSTYISKSCSFYLQNVSCIHSSLSIFNLFQCPIISCMEECNNWLTGLFLHFKIKRCDR

SEQ ID NO: 292 - protein, 66 aa, Homo sapiens
  SITE (44): Xaa equals any of the naturally occurring L-amino acids
  SITE (66): Xaa equals stop translation
MLCTILTVVIIIAAQTTRTTGIPKNAPGPAPLCAPRSPRLFLQXYRGPNGRPAHPFLGPSDLDTSX

SEQ ID NO: 293 - protein, 257 aa, Homo sapiens
  SITE (75): Xaa equals any of the naturally occurring L-amino acids
  SITE (187): Xaa equals any of the naturally occurring L-amino acids
  SITE (229): Xaa equals any of the naturally occurring L-amino acids
  SITE (232): Xaa equals any of the naturally occurring L-amino acids
  SITE (235): Xaa equals any of the naturally occurring L-amino acids
  SITE (236): Xaa equals any of the naturally occurring L-amino acids
  SITE (237): Xaa equals any of the naturally occurring L-amino acids
  SITE (257): Xaa equals stop translation
MLGAKPHWLPGPLHSPGLPLVLVLLALGAGWAQEGSEPVLLEGECLVVCEPGRAAAGGPGGAALGEAPPGRVAFXAVRSHHHEPAGETGNGTSGAIYFDQVLVNEGGGFDRASGSFVAPVRGVYSFRFHVVKVYNRQTVQVSLMLNTWPVISAFANDPDVTREAATSSVLLPLDPGDRVSLRLRRGXSTGWLEILKFLWLPHLPSLKDPSLSSTRIQPLTTFFCPLLPXKQXKQXXXSLWLLSHLFAWEPVPNTQVX

SEQ ID NO: 294 - protein, 103 aa, Homo sapiens
  SITE (78): Xaa equals any of the naturally occurring L-amino acids
  SITE (80): Xaa equals any of the naturally occurring L-amino acids
  SITE (81): Xaa equals any of the naturally occurring L-amino acids
  SITE (82): Xaa equals any of the naturally occurring L-amino acids
  SITE (103): Xaa equals stop translation
MAPRALPGSAVLAAAVFVGGAVSSPLVAPDNGSSRTLHSRTETTPSPSNDTGNGHPEYIAYALVPVFFIMGLFGVLIXPXXXKKKGYRCTTEAEQDIEEEKGX

SEQ ID NO: 295 - protein, 33 aa, Homo sapiens
  SITE (33): Xaa equals stop translation
MPVTLSSLGFWVLLSLLFPWRTDQGCGPATCYX

SEQ ID NO: 296 - protein, 43 aa, Homo sapiens
  SITE (10): Xaa equals any of the naturally occurring L-amino acids
  SITE (43): Xaa equals stop translation
MVLGLLLLLXFFSFSSSPSPSSSLLLLSSFFFQSLALSPRLEX

SEQ ID NO: 297 - protein, 21 aa, Homo sapiens
  SITE (21): Xaa equals stop translation
EWLVFTFLLVFGSPLGKGPLX

SEQ ID NO: 298 - protein, 70 aa, Homo sapiens
  SITE (70): Xaa equals stop translation
MIRALSLFLLIFDAALFSLSVFVFIGHLLPMPKGTGLHSCAKHLIKSLKENVLPLMNYPDCKLKINISPX

SEQ ID NO: 299 - protein, 75 aa, Homo sapiens
  SITE (75): Xaa equals stop translation
MGKLIRLSVMVMSVRRLFSIYWVLSTVPDAVGSRGGMEEECSRGLCCVAGQHKQAKGKRQAWNKGGEYQCVTYCX

SEQ ID NO: 300 - protein, 33 aa, Homo sapiens
  SITE (33): Xaa equals stop translation
MPALVTLLLLFPLLPLMEASCHVMRCPMERPTX

SEQ ID NO: 301 - protein, 17 aa, Homo sapiens
  SITE (17): Xaa equals stop translation
EAPWGLLKLLLLLAVFX

SEQ ID NO: 302 - protein, 17 aa, Homo sapiens
  SITE (17): Xaa equals stop translation
MQQKQKKANEKKEEPKX

SEQ ID NO: 303 - protein, 111 aa, Homo sapiens
  SITE (9): Xaa equals any of the naturally occurring L-amino acids
MQSPKFLSXTPYLFQTPFHLISLPCHFFIFKMPIVYVLFKFFERLKQPLSKIPFCLLAFKFSIRAFFLPLWHAALWLSFVFFAGFLHDVVVVSCLTLCGVVSCSFSSPRCL

SEQ ID NO: 304 - protein, 12 aa, Homo sapiens
  SITE (12): Xaa equals stop translation
MALLISSLIWSX

SEQ ID NO: 305 - protein, 35 aa, Homo sapiens
  SITE (35): Xaa equals stop translation
MQMFTVSLLLSLLLRSTDQNHLQLLVGREDHYGGX

SEQ ID NO: 306 - protein, 15 aa, Homo sapiens
  SITE (15): Xaa equals stop translation
MSESACILNNQKELX

SEQ ID NO: 307 - protein, 44 aa, Homo sapiens
  SITE (44): Xaa equals stop translation
MDLDRVKAEATEDITSGVLCLLFLRLPPNSCIFPSAVLGSTRTX

SEQ ID NO: 308 - protein, 137 aa, Homo sapiens
MMVVGTGTSLALSSLLSLLLFAGMQMYSRQLASTEWLTIQGGLLGSGLFVFSLTAFNNLENLVFGKGFQAKIFPEILLCLLLALFASGLIHRVCVTTCFIFSMVGLYYINKISSTLYQAAAPVLTPAKVTGKSKKRN

SEQ ID NO: 309 - protein, 34 aa, Homo sapiens
  SITE (34): Xaa equals stop translation
MFIFLFLCVLSRKIQEEYYRLFKNVPCCFGCLRX

SEQ ID NO: 310 - protein, 137 aa, Homo sapiens
  SITE (137): Xaa equals stop translation
MRTPGPLPVLLLLLAGAPAARPTPPTCYSRMRALSQEITRDFNLLQVSEPSEPCVRYLPRLYLDIHNYCVLDKLRDFVASPPCWKVAQVDSLKDKARKLYTIMNSFCRRDLVFLLDDCNALEYPIPVTTVLPDRQRX

SEQ ID NO: 311 - protein, 58 aa, Homo sapiens
  SITE (14): Xaa equals any of the naturally occurring L-amino acids
  SITE (37): Xaa equals any of the naturally occurring L-amino acids
  SITE (58): Xaa equals stop translation
MWLLKPSAHSPVHXLVLLFPRGWSQPGTHKRQILVNXASLPGGCLLPWIWSGAALRFX

SEQ ID NO: 312 - protein, 35 aa, Homo sapiens
  SITE (35): Xaa equals stop translation
MSRRAEASIFVLPKTLLFVLFPAFPSPAVGCPVPX

SEQ ID NO: 313 - protein, 90 aa, Homo sapiens
  SITE (90): Xaa equals any of the naturally occurring L-amino acids
MALEMVWGSVYHCSCYITPWSKIQSFSLSLFQFILQEVNITLPENSVWYERYKFDIPVFHLNGQFLMMHRVNTSKLEKQLLKLEQQSTGX

SEQ ID NO: 314 - protein, 95 aa, Homo sapiens
  SITE (95): Xaa equals stop translation
MFVLFSLPKYAGLRLPIPGLSALLVFLLSLFSRRAQVELTTGRETLPKNLQGYFPEFGFQVQNFLSCKIYAASQKQPLPPLYQLRFYLKHMGLPX

SEQ ID NO: 315 - protein, 44 aa, Homo sapiens
  SITE (44): Xaa equals stop translation
MSSHWTLKILLVPLFYLSLEFPSGFVLCLANDLGYHFSSRVRSX

SEQ ID NO: 316 - protein, 31 aa, Homo sapiens
  SITE (31): Xaa equals stop translation
MLVVNINLVFLLFFIFLCYLDACINVFCFYX

SEQ ID NO: 317 - protein, 113 aa, Homo sapiens
  SITE (69): Xaa equals any of the naturally occurring L-amino acids
  SITE (113): Xaa equals stop translation
MPVLPGRTTALLSLTLAFAVPCSGVEAGPCVPRSHGCSSWEASVCVTSSTPGGSWRARALFPSAAWHRXAAWDSPWTQTGDFARGAMGGAGALPGGCVCISGRPRAQKLPALX

SEQ ID NO: 318 - protein, 235 aa, Homo sapiens
MSPRYPGGPRPPLRIPNQALGGVPGSQPLLPSGMDPTRQQGHPNMGGPMQRMTPPRGMVPLGPQNYGGAMRPPLNALGGPGMPGMNMGPGGGRPWPNPTNANSIPYSSASPGNYVGPPGGGGPPGTPIMPSPADSTNSGDNMYTLMNAVPPGPNRPNFPMGPGSDGPMGGLGGMESHHMNGSLGSGDMDSISKNSPNNMSLSNQPGTPRDDGEMGGNFLNPFQSESYSPSMTMSV

SEQ ID NO: 319 - protein, 35 aa, Homo sapiens
  SITE (35): Xaa equals stop translation
MENFFFSFYLFLITLIPNGRTLSTTADHCKIPCIX

SEQ ID NO: 320 - protein, 35 aa, Homo sapiens
  SITE (35): Xaa equals stop translation
MELWELALCLLVALSAHMFTVQLLADLGFLFGGFX

SEQ ID NO: 321 - protein, 82 aa, Homo sapiens
  SITE (82): Xaa equals stop translation
MGAGILALLLPLESVLTCSWISVSTSERQLWQSSQKATILSLKLDSCFCGHSGLKGKNEDTDSSVPIIPSKTHTHLGKHLIX

SEQ ID NO: 322 - protein, 72 aa, Homo sapiens
  SITE (47): Xaa equals any of the naturally occurring L-amino acids
  SITE (70): Xaa equals any of the naturally occurring L-amino acids
  SITE (72): Xaa equals stop translation
MFYFVLFIYSSSETWSGSVAQDGVHGVIIGHCSVELPGSGDPPASAXLVAGTIGTCPTMPGFVYFLNDVXNX

SEQ ID NO: 323 - protein, 34 aa, Homo sapiens
  SITE (10): Xaa equals any of the naturally occurring L-amino acids
  SITE (34): Xaa equals stop translation
MDSTLRQGRXLLTLVPASLFSLTLGGPGPWKDPX

SEQ ID NO: 324 - protein, 115 aa, Homo sapiens
  SITE (111): Xaa equals any of the naturally occurring L-amino acids
  SITE (112): Xaa equals any of the naturally occurring L-amino acids
  SITE (115): Xaa equals any of the naturally occurring L-amino acids
MQVVGSWPGRVGVVGLAFSLVIPPPAICIAGPAPGLGGGERQQKGLGRGGGGLRNCPGRVGMAAEPGALLCLTSRDGSLLLSCVRPHHVIKPKGTAKKKKKKKKKKKKKKXXGGX

SEQ ID NO: 325 - protein, 108 aa, Homo sapiens
  SITE (98): Xaa equals any of the naturally occurring L-amino acids
  SITE (99): Xaa equals any of the naturally occurring L-amino acids
  SITE (100): Xaa equals any of the naturally occurring L-amino acids
MDLPQFIYLFIFCFCCLAIVNNASINIHIQVSMWLYVFISLGYLHGSRILGHNIILCLTSQRIAKRFFIVAASFTFPPAMYKDFYFSISLHLPTLLFXXXFVFSLLPP

SEQ ID NO: 326 - protein, 65 aa, Homo sapiens
  SITE (36): Xaa equals any of the naturally occurring L-amino acids
  SITE (65): Xaa equals stop translation
MCSPSLSSSPPPLLQVFFFFFFSPHWAAKVVPQWKXRHPQVSSQLLLCFLRVNCQFLFLQEILFX

SEQ ID NO: 327 - protein, 49 aa, Homo sapiens
MCLSRWKIFYTLLILFAFFSITSENETFYMIIIHHNPTQITASCSFTFL

SEQ ID NO: 328 - protein, 293 aa, Homo sapiens
  SITE (36): Xaa equals any of the naturally occurring L-amino acids
MERPDWETAIQKPLCSLPAGSGNALAASLNHYAGYXQVTNEDLLTNCTLLLCRRLLSPMNLLSLHTASGLRLFSVLSLAWGFIADVDLESEKYRRLGEMRFTLGTFLRLAALRTYRGRLAYLPVGRVGSKTPASPVVVQQGPVDAHLVPLEEPVPSHWTVVPDEDFVLVLALLHSHLGSEMFAAPMGRCAAGVMHLFYVRAGVSRAMLLRLFLAMEKGRHMEYECPYLVYVPVVAFRLEPKDGKGVFAVDGELMVSEAVQGQVHPNYFWMVSGCVEPPPSWKPQQMPPPEEPL

SEQ ID NO: 329 - protein, 68 aa, Homo sapiens
  SITE (68): Xaa equals stop translation
MPLEGFCLVLDIGFLLVMLISLASECFTTCLDSFSTTEPGCKFYKLLHSVSLLNINFNVKSLLCSHIX

SEQ ID NO: 330 - protein, 105 aa, Homo sapiens
  SITE (105): Xaa equals stop translation
MPLQLSGQYWISLLVFLSLQPFPQAAIPCALTDVGGSCVICHILLNCLCILFTLTAPSLSHVLLIKMSLSVCYEPGADLSDRAATGNKKLTRSTCLLMHSNKLCX

SEQ ID NO: 331 - protein, 58 aa, Homo sapiens
MWGCSGLGHRTVSFLLLLPCSFPRPCGLFGLIPISRPCKVEAPRPLSPTTLMCQSPLL

SEQ ID NO: 332 - protein, 39 aa, Homo sapiens
  SITE (14): Xaa equals any of the naturally occurring L-amino acids
  SITE (39): Xaa equals stop translation
MLNVLSKVQQLVSXLGLVTFLLNHSAAGGSPQHRWLLLX

SEQ ID NO: 333 - protein, 72 aa, Homo sapiens
  SITE (58): Xaa equals any of the naturally occurring L-amino acids
  SITE (72): Xaa equals stop translation
MKAIARACLLLSLLVLPHVVSEHLFWHHNPRHPVIWPFPPFHLISCSVSASTWHLGEXLLLLVPIAPSVWSX

SEQ ID NO: 334 - protein, 62 aa, Homo sapiens
  SITE (62): Xaa equals stop translation
MEQGGGPRLLLLIPGLLHNTYLARPGDFPAQGTTENTECQGSPSPISHLGKVRSLDSNTQIX

SEQ ID NO: 335 - protein, 286 aa, Homo sapiens
  SITE (286): Xaa equals stop translation
MPLLFFSVSTLFSGSVTLQQRGMFLPWTGTGEQVLALLWPRFELILEMNVQSVRSTDPQRLGGLDTRPHYITRRYAEFSSALVSINQTIPNERTMQLLGQLQVEVENFVLRVAAEFSSRKEQLVFLINNYDMMLGVLMERAADDSKEVESFQQLLNARTQEFIEELLSPPFGGLVAFVKEAEALIERGQAERLRGEEARVTQLIRGFGSSWKSSVESLSQDVMRSFTNFRNGTSIIQGALTQLIQLYHRFHRVLSQPQLRALPARAELINIHHLMVELKKHKPNFX

SEQ ID NO: 336 - protein, 55 aa, Homo sapiens
  SITE (55): Xaa equals stop translation
MFRALRDLLTHYPQQILLQVLVVMYQVLQVWELPWPELIHLQGIVPTDQLHLKQX

SEQ ID NO: 337 - protein, 59 aa, Homo sapiens
MSYPLFLFMSCMVISLSPNAGSQTSTVRCLSDLVTFTLIKGSPVHQTPYLESSINCITF

SEQ ID NO: 338 - protein, 120 aa, Homo sapiens
  SITE (120): Xaa equals stop translation
MHPARKLLSLLFLILMGTELTQDSAAPDSLLRSSKGSTRGSLAAIVIWRGKSESRIAKTPGIFRGGGTLVLPPTHTPEWLILPLGITLPLGAPETGGGDCAAETWKGSQRAGQLCALLAX

SEQ ID NO: 339 - protein, 38 aa, Homo sapiens
  SITE (33): Xaa equals any of the naturally occurring L-amino acids
MPSFFLSLIQTNTLGSASFLLFLTLHIHLSPNXVHSAS

SEQ ID NO: 340 - protein, 46 aa, Homo sapiens
MFSRTSNFWTFFFQFLIFKVFLVLKNLFTSQKIYKIYSEKPKKKKK

SEQ ID NO: 341 - protein, 62 aa, Homo sapiens
  SITE (17): Xaa equals any of the naturally occurring L-amino acids
  SITE (62): Xaa equals stop translation
MSSLLSAGLQASLCGKXLWASTWYLVCCLLPFFHQGCCDHKSKQQYIPNLKSYCGLSTIEIX

SEQ ID NO: 342 - protein, 87 aa, Homo sapiens
  SITE (87): Xaa equals stop translation
MVLFCFVLFCFVFEMDSSSVTQAGVQWCDLGSLQAPPPGFSPFSCLSLPSSWDYRRPPPRPANFLYFLVETGFHHVSQDGLDLLTSX

SEQ ID NO: 343 - protein, 538 aa, Homo sapiens
  SITE (538): Xaa equals stop translation
MSTKKLCIVGGILLVFQIIAFLVGGLIAPGPTTAVSYMSVKCVDARKNHHKTKWFVPWGPNHCDKIRDIEEAIPREIEANDIVFSVHIPLPHMEMSPWFQFMLFILQLDIAFKLNNQIRENAEVSMDVSLAYRDDAFAEWTEMAHERVPRKLKCTFTSPKTPEHEGRYYECDVLPFMEIGSVAHKFYLLNIRLPVNEKKKINVGIGEIKDIRLVGIHQNGGFTKVWFAMKTFLTPSIFIIMVWYWRRITMMSRPPVLLEKVIFALGISMTFINIPVEWFSIGFDWTWMLLFGDIRQGIFYAMLLSFWIIFCGEHMMDQHERNHIAGYWKQVGPIAVGSFCLFIFDMCERGVQLTNPFYSIWTTDIGTELAMAFIIVAGICLCLYFLFLCFMVFQVFRNISGKQSSLPAMSKVRRLHYEGLIFRFKFLMLITLACAAMTVIFFIVSQVTEGHWKWGGVTVQVNSAFFTGIYGMWNLYVFALMFLYAPSHKNYGEDQSNGMQLPCKSREDCALFVSELYQELFSASKYSFINDNAASGIX

SEQ ID NO: 344 - protein, 202 aa, Homo sapiens
  SITE (202): Xaa equals stop translation
MGIALAVLGWLAVMLCCALPMWRVTAFIGSNIVTSQTIWEGLWMNCVVQSTGQMQCKVYDSLLALPQDLQAARALVIISIIVAALGVLLSVVGGKCTNCLEDESAKAKTMIVAGVVFLLAGLMVIVPVSWTAHNIIQDFYNPLVASGQKREMGASLYVGWAASGLLLLGGGLLCCNCPPRTDKPYSAKYSAARSAAASNYVX

SEQ ID NO: 345 - protein, 122 aa, Homo sapiens
MVSISVVLRVSLPTLEPVPVAGRSIWISTTSPSMISVSSLMRTPMDRRKACVSASVLLISREKISLPAMAVNGVSGPRACAMPMAMAVFPVPGWPAIRTARPAIFPSRIISSTTPAARRAAS

SEQ ID NO: 346 - protein, 260 aa, Homo sapiens
MLALLGLSQALNILLGLKGLAPAEISAVCEKGNFNVAHGLAWSYYIGYLRLILPELQARIRTYNQHYNNLLRGAVSQRLYILLPLDCGVPDNLSMADPNIRFLDKLPQQTGDRAGIKDRVYSNSIYELLENGQRAGTCVLEYATPLQTLFAMSQYSQAGFSGEDRLEQAKLFCRTLEDILADAPESQNNCRLIAYQEPADDSSFSLSQEVLRHLRQEEKEEVTVGSLKTSAVPSTSTMSQEPELLISGMEKPLPLRTDFS

SEQ ID NO: 347 - protein, 48 aa, Homo sapiens
  SITE (48): Xaa equals stop translation
MTPQKPALAVLLLEVPLLLTLSVLKKRCLVTCEPTSRFVSCDLPLSVX

SEQ ID NO: 348 - protein, 334 aa, Homo sapiens
  SITE (288): Xaa equals any of the naturally occurring L-amino acids
  SITE (334): Xaa equals stop translation
MAAAAWLQVLPVILLLLGAHPSPLSFFSAGPATVAAADRSKWHIPIPSGKNYFSFGKILFRNTTIFLKFDGEPCDLSLNITWYLKSADCYNEIYNFKAEEVELYLEKLKEKRGLSGKYQTSSKLFQNCSELFKTQTFSGDFMHRLPLLGEKQEAKENGTNLTFIGDKTAMHEPLQTWQDAPYIFIVHIGISSSKESSKENSLSNLFTMTVEVKGPYEYLTLEDYPLMIFFMVMCIVYVLFGVLWLAWSACYWRDLLRIQFWIGAVIFLGMLEKAVFYAEFQNIRYKGXSVQGALILAELLSAVKRSLARTLVIIVSLGYGIVKPRLESLFIRLX

SEQ ID NO: 349 - protein, 200 aa, Homo sapiens
  SITE (4): Xaa equals any of the naturally occurring L-amino acids
  SITE (193): Xaa equals any of the naturally occurring L-amino acids
  SITE (200): Xaa equals stop translation
MVLXVVTLGLALFTLCGKFKRWKLNGAFLLITAFLSVLIWVAWMTMYLFGNVKLQQGDAWNDPTLAITLAASAGSSSSSTPSLRSTAPFCQPCRRTRPTTSTRRSPGCGRRPSRRTCSCRGPIWRTRPSPWMNTMQLSEQQDFPTAAWEKDPVAAWGKDPALRLEATCISQLRWPSCSTVGPSQLLRQVTQEXTFGERLX

SEQ ID NO: 350 - protein, 24 aa, Homo sapiens
  SITE (24): Xaa equals stop translation
MLLHHQLLIVTLHLVLLLATLLVX

SEQ ID NO: 351 - protein, 143 aa, Homo sapiens
  SITE (85): Xaa equals any of the naturally occurring L-amino acids
  SITE (131): Xaa equals any of the naturally occurring L-amino acids
  SITE (143): Xaa equals stop translation
MTKALLIYLVSSFLALNQASLISRCDLAQVLQLEDLDGFEGYSLSDWLCLAFVESKFNISKINENADGSFDYGLFQINSHYWCNXYKSYSENLCHVDCQDLLNPNLLAGIHCAKRIVSGARGMNNWVRMEXCTVQAGHSSTGX

SEQ ID NO: 352 - protein, 95 aa, Homo sapiens
  SITE (95): Xaa equals stop translation
MLVIAGGILAALLLLIVVVLCLYFKIHNALKAAKEPEAVAVKNHNPDKVWWAKNSQAKTIATESCPALQCCEGYRMCASFDSLPPCCCDINEGLX

SEQ ID NO: 353 - protein, 38 aa, Homo sapiens
  SITE (38): Xaa equals stop translation
MLLKSNILMLNLFAANVGANFALTVEKIGMILLNVSGX

SEQ ID NO: 354 - protein, 39 aa, Homo sapiens
  SITE (39): Xaa equals stop translation
MLVVAFGLLVLYILLASSWKRPEPGILTDRQPLLHDGEX

SEQ ID NO: 355 - protein, 71 aa, Homo sapiens
  SITE (35): Xaa equals any of the naturally occurring L-amino acids
  SITE (71): Xaa equals stop translation
SDPLASASQNAGIVSVGLCTRPGPQFKNAQPPFPXQKAPRCLWENQPPPWRKAWDLPSHLGRRGICGKSFX

SEQ ID NO: 356 - protein, 227 aa, Homo sapiens
MADLLGSILSSMEKPPSLGDQETRRKAREQAARLKKLQEQEKQQKVEFRKRMEKEVSDFIQDSGQIKKKFQPMNKIERSILHDVVEVAGLTSFSFGEDDDCRYVMIFKKEFAPSDEELDSYRRGEEWDPQKAEEKRKLKELAQRQEEEAAQQGPVVVSPASDYKDKYSHLIGKGAAKDAAHMLQANKTYGCVPVANKRDTRSIEEAMNEIRAKKRLRQSGEELPPTS

SEQ ID NO: 357 - protein, 90 aa, Homo sapiens
  SITE (50): Xaa equals any of the naturally occurring L-amino acids
  SITE (53): Xaa equals any of the naturally occurring L-amino acids
  SITE (59): Xaa equals any of the naturally occurring L-amino acids
  SITE (60): Xaa equals any of the naturally occurring L-amino acids
  SITE (61): Xaa equals any of the naturally occurring L-amino acids
  SITE (64): Xaa equals any of the naturally occurring L-amino acids
  SITE (65): Xaa equals any of the naturally occurring L-amino acids
  SITE (90): Xaa equals stop translation
MWDWDWSAPWSWPLWLSLALVCLSAGAKGHRASEAGHARALTCEMGSEFXTAXGLVLGXXXWTXXNGSAGPERRGWRPAAFLAVFLLGDX

SEQ ID NO: 358 - protein, 48 aa, Homo sapiens
  SITE (41): Xaa equals any of the naturally occurring L-amino acids
MFGPTFHSLVLVPPWPNLSLLHFTSPVGQHSSFLPTSLRLXKKKKKKK

SEQ ID NO: 359 - protein, 56 aa, Homo sapiens
  SITE (56): Xaa equals stop translation
MCSKNGFLLAWSWNSPWLPQASLAHGCWGRWMSDLVGCSRENKCALRDHSERVQGX

SEQ ID NO: 360 - protein, 222 aa, Homo sapiens
  SITE (4): Xaa equals any of the naturally occurring L-amino acids
  SITE (222): Xaa equals stop translation
SPLXFCVVLLLQAARGYVVRKPAQSRLDDDPPPSTLLKDYQNVPGIEKVDDVVKRLLSLEMANKKEMLKIKQEQFMKKIVANPEDTRSLEARIIALSVKIRSYEEHLEKHRKDKAHKRYLLMSIDQRKKMLKNLRNTNYDVFEKICWGLGIEYTFPPLYYRRAHRRFVTKKALCIRVFQETQKLKKRRRALKAAAAAQKQAKRRNPDSPAKAIPKTLKDSQX

SEQ ID NO: 361 - protein, 432 aa, Homo sapiens
MGAPAASLLLLLLLFACCWAPGGANLSQDGYWQEQDLELGTLAPLDEAISSTVWSSPDMLASQDSQPWTSDETVVAGGTVVLKCQVKDHEDSSLQWSNPAQQTLYFGEKRALRDNRIQLVTSTPHELSISISNVALADEGEYTCSIFTMPVRTAKSLVTVLGIPQKPIITGYKSSLREKDTATLNCQSSGSKPAARLTWRKGDQELHGEPTRIQEDPNGKTFTVSSSVTFQVTREDDGASIVCSVNHESLKGADRSTSQRIEVLYTPTAMIRPDPPHPREGQKLLLHCEGRGNPVPQQYLWEKEGSVPPLKMTQESALIFPFLNKSDSGTYGCTATSNMGSYKAYYTLNVNDPSPVPSSSSTYHAIIGGIVAFIVFLLLIMLIFLGHYLIRHKGTYLTHEAKGSDDAPDADTAIINAEGGQSGGDDKKEYFI

SEQ ID NO: 362 - protein, 154 aa, Homo sapiens
  SITE (111): Xaa equals any of the naturally occurring L-amino acids
  SITE (124): Xaa equals any of the naturally occurring L-amino acids
  SITE (125): Xaa equals any of the naturally occurring L-amino acids
  SITE (135): Xaa equals any of the naturally occurring L-amino acids
  SITE (144): Xaa equals any of the naturally occurring L-amino acids
  SITE (154): Xaa equals stop translation
MVAPVWYLVAAALLVGFILFLTRSRGRAASAGQEPLHNEELAGAGRVAQPGPLEPEEPRAGGRPRRRRDLGSRLQAQRRAQRVAWAEADENEEEAVILAQEEEGVEKPAEXHLSGKIGAKKLRXXEEKQARKAQXEAEEAEREXRKRLESQREX

SEQ ID NO: 363 - protein, 17 aa, Homo sapiens
  SITE (17): Xaa equals stop translation
MQKCMLSALVFHIQWSX

SEQ ID NO: 364 - protein, 10 aa, Homo sapiens
  SITE (10): Xaa equals stop translation
MLVCSFLFLX

SEQ ID NO: 365 - protein, 14 aa, Homo sapiens
  SITE (14): Xaa equals stop translation
VIELCVSLRSLNFX

SEQ ID NO: 366 - protein, 18 aa, Homo sapiens
  SITE (5): Xaa equals any of the naturally occurring L-amino acids
  SITE (6): Xaa equals any of the naturally occurring L-amino acids
  SITE (7): Xaa equals any of the naturally occurring L-amino acids
  SITE (10): Xaa equals any of the naturally occurring L-amino acids
  SITE (18): Xaa equals stop translation
MCEFXXXIMXLAGYFACX

SEQ ID NO: 367 - protein, 62 aa, Homo sapiens
  SITE (62): Xaa equals stop translation
MVGGYVSSFSFPPVSSSLLLPASFAFPFLPGTPCPFLYFLPSPFSPLPLSLTRSNSFLLNGX

SEQ ID NO: 368 - protein, 33 aa, Homo sapiens
  SITE (33): Xaa equals stop translation
EKKSMSVSDIYALESLGRSLFTLNSMCLPLSFX

SEQ ID NO: 369 - protein, 245 aa, Homo sapiens
  SITE (79): Xaa equals any of the naturally occurring L-amino acids
MGGASRRVESGAWAYLSPLVLRKELESLVENEGSEVLALPELPSAHPIIFWNLLWYFQRLRLPSILPGLVLASCDGPSXSQAPSPWLTPDPASVQVRLLWDVLTPDPNSCPPLYVLWRVHSQIPQRVVWPGPVPASLSLALLESVLRHVGLNEVHKAVGLLLETLGPPPTGLHLQRGIYREILFLTMAALGKDHVDIVAFDKKYKSAFNKLASSMGKEELRHRRAQMPTPKAIDCRKCFGAPPEC

SEQ ID NO: 370 - protein, 35 aa, Homo sapiens
  SITE (35): Xaa equals stop translation
MKFSLLFLPMLLILKPDLFHISICTLAACGLTFPX

SEQ ID NO: 371 - protein, 22 aa, Homo sapiens
  SITE (22): Xaa equals stop translation
MLFFFILHLLSIMSFLSPDIMX

SEQ ID NO: 372 - protein, 98 aa, Homo sapiens
  SITE (82): Xaa equals any of the naturally occurring L-amino acids
MFGLLVESQTLLEENAVQGTERTLGLNIAPFINQFQVPIRVFLDLSSLPCIPLSKPVELLRLDLMTPYLNTSNREVKVYVCXIWEDLTAIPFWVSYVP

SEQ ID NO: 373 - protein, 78 aa, Homo sapiens
  SITE (7): Xaa equals any of the naturally occurring L-amino acids
  SITE (42): Xaa equals any of the naturally occurring L-amino acids
  SITE (43): Xaa equals any of the naturally occurring L-amino acids
MFGAHRXWQGSVLLFLSFAWGNGGSVTFSDVPRVMPLAGGPXXQVSSTPRPPPHQVTSSPGLESAHIVCPERKKKKKK

SEQ ID NO: 374 - protein, 31 aa, Homo sapiens
  SITE (4): Xaa equals any of the naturally occurring L-amino acids
  SITE (7): Xaa equals any of the naturally occurring L-amino acids
  SITE (20): Xaa equals any of the naturally occurring L-amino acids
  SITE (25): Xaa equals any of the naturally occurring L-amino acids
  SITE (28): Xaa equals any of the naturally occurring L-amino acids
  SITE (31): Xaa equals stop translation
TLLXFLXLLTTEGGRENIFXGRILXLQXSPX

SEQ ID NO: 375 - protein, 57 aa, Homo sapiens
  SITE (32): Xaa equals any of the naturally occurring L-amino acids
  SITE (57): Xaa equals stop translation
MLSFFICLLIFVHLLLLSFLISDWPPPTGSAXHKILRLMVVQRLSLLDQRKRWSEAX

SEQ ID NO: 376 - protein, 63 aa, Homo sapiens
  SITE (14): Xaa equals any of the naturally occurring L-amino acids
MCHHAWLIFKFFVXMGSHYVAQAGFRFLCSRDSANLAPQSAGITNVSHCIWPIFFFKKKMQRC

SEQ ID NO: 377 - protein, 38 aa, Homo sapiens
MTMVLCIFILGHHAREDPPSNGHITSEGAFLVNVGAPQ

SEQ ID NO: 378 - protein, 98 aa, Homo sapiens
  SITE (45): Xaa equals any of the naturally occurring L-amino acids
MLRLEARATTPGLQTHSCLGFYIKYEHKNTFPKYSLWLCLTLGTXPSTSSILRYVRGVYRGLEYIRFFSNSSSSRRRLTTSLGFKVSGLKFPPEITIR

SEQ ID NO: 379 - protein, 15 aa, Homo sapiens
  SITE (15): Xaa equals stop translation
TLTSFLELPLAPEPX

SEQ ID NO: 380 - protein, 34 aa, Homo sapiens
  SITE (34): Xaa equals stop translation
MHRYITFFKCFRSVILDLLFILSPLSQGCFILFX

SEQ ID NO: 381 - protein, 66 aa, Homo sapiens
  SITE (14): Xaa equals any of the naturally occurring L-amino acids
  SITE (62): Xaa equals any of the naturally occurring L-amino acids
MFGFIFLLLIFCIXLCSRTLSTFIPKLVGFLYWKFSINLSLLLTLIKKKKKKKKTPRGGPGXQSPP

SEQ ID NO: 382 - protein, 317 aa, Homo sapiens
  SITE (207): Xaa equals any of the naturally occurring L-amino acids
MPGLGRPRQARWTLMLLLSTAMYGAHAPLLALCHVDGRVPFRPSSAVLLTELTKLLLCAFSLLVGWQAWPQGPPPWRQAAPFALSALLYGANNNLVIYLQRYMDPSTYQVLSNLKIGSTAVLYCLCLRHRLSVRQGLALLLLMAAGACYAAGGLQVPGNTLPSPPPAAAASPMPLHITPLGLLLLILYCLISGLSSVYTELLMKRQXLPLALQNLFLYTFGVLLNLGLHAGGGSGPGLLEGFSGWAALVVLSQALNGLLMSAVMKHGSSITRLFVVSCSLVVNAVLSAVLLRLQLTAAFFLATLLIGLAMRLYYGSR

SEQ ID NO: 383 - protein, 31 aa, Homo sapiens
  SITE (20): Xaa equals any of the naturally occurring L-amino acids
  SITE (23): Xaa equals any of the naturally occurring L-amino acids
  SITE (31): Xaa equals stop translation
MGEQPHFSLCVLLAAVREDXDPXVFPCCFLX

SEQ ID NO: 384 - protein, 43 aa, Homo sapiens
  SITE (43): Xaa equals stop translation
MSFIALHPLLPEAALGVPGQSPHRPLWQTQCCVAPPQPRAEFX

SEQ ID NO: 385 - protein, 255 aa, Homo sapiens
  SITE (255): Xaa equals stop translation
MVTALTLLAFPLLLLHAERISLVFLLLFLQSFLLLHLLAAGIPVTTPGPFTVPWQAVSAWALMATQTFYSTGHQPVFPAIHWHAAFVGFPEGHGSCTWLPALLVGANTFASHLLFAVGCPLLLLWPFLCESQGLRKRQQPPGNEADARVRPEEEEEPLMEMRLRDAPQHFYAALLQLGLKYLFILGIQILACALAASILRRHLMVWKVFAPKFIFEAVGFIVSSVGLLLGIALVMRVDGAVSSWFRQLFLAQQRX

SEQ ID NO: 386 - protein, 20 aa, Homo sapiens
  SITE (2): Xaa equals any of the naturally occurring L-amino acids
  SITE (20): Xaa equals stop translation
MXGPWGEEALIRLPTPSGLX

SEQ ID NO: 387 - protein, 64 aa, Homo sapiens
  SITE (6): Xaa equals any of the naturally occurring L-amino acids
  SITE (64): Xaa equals stop translation
MATLEXNQREVDREIRSLLLWFLLCEIVSGWLCPEGPWFSQGCQIYKNLSSSSSYNLSFLLSLX

SEQ ID NO: 388 - protein, 40 aa, Homo sapiens
  SITE (40): Xaa equals stop translation
MIHSGCTSQCLEGFFLIFLLDFNPVLALDLIGIMRKASHX

SEQ ID NO: 389 - protein, 35 aa, Homo sapiens
  SITE (35): Xaa equals stop translation
MVFSARVSLYTRFKVILLSLLIMILHVCWVWVILX

SEQ ID NO: 390 - protein, 11 aa, Homo sapiens
  SITE (11): Xaa equals stop translation
GLLYIMYCNIX

SEQ ID NO: 391 - protein, 64 aa, Homo sapiens
  SITE (64): Xaa equals stop translation
MNNGLLQQPSALMLLPCRPVLTSVALNANFVSWKSRTKYTITPVKMRKSGGRDHTGGNKDRGIX

SEQ ID NO: 392 - protein, 19 aa, Homo sapiens
  SITE (19): Xaa equals stop translation
MRKQRLVPMYLGLIYILLX

SEQ ID NO: 393 - protein, 43 aa, Homo sapiens
MEISVIKIFQDETTLKIKLCLVSLSSLLVSLLLLILPESTSLW

SEQ ID NO: 394 - protein, 17 aa, Homo sapiens
  SITE (17): Xaa equals stop translation
LLLPVLASSVPSHSATX

SEQ ID NO: 395 - protein, 84 aa, Homo sapiens
  SITE (84): Xaa equals stop translation
MLPLLLFTYLNSFLHQRIPQSVRILGSLVAILLVFLITAILVKVQLDALPFFVITMIKIVLINSFGAILQGSLFGLAGLLPASX

SEQ ID NO: 396 - protein, 21 aa, Homo sapiens
  SITE (19): Xaa equals any of the naturally occurring L-amino acids
  SITE (21): Xaa equals stop translation
MKLSLFLILSDVFYLGSPXTX

SEQ ID NO: 397 - protein, 29 aa, Homo sapiens
  SITE (29): Xaa equals stop translation
MGTRRKGVAWLSLAPLITGLAPAHITAVX

SEQ ID NO: 398 - protein, 34 aa, Homo sapiens
  SITE (34): Xaa equals stop translation
MKDLLQRNPWKNSLLLLQVCQAFLVCSLTQLAVX

SEQ ID NO: 399 - protein, 47 aa, Homo sapiens
  SITE (47): Xaa equals stop translation
MSESHKIWWCYRHLAFPLLTLILYPATLGRSVFCHDCKFPEASPAMX

SEQ ID NO: 400 - protein, 25 aa, Homo sapiens
  SITE (21): Xaa equals any of the naturally occurring L-amino acids
  SITE (25): Xaa equals stop translation
MLNRIMVASFGAVLVQVCRGXGQGX

SEQ ID NO: 401 - protein, 68 aa, Homo sapiens
  SITE (68): Xaa equals stop translation
MQLLLLGLIRSQPSPPPSLCLMLCPCLPCLRYSPFVPQHPCPLPLDLCLAGCSSLSVQDKCSWPYPIX

SEQ ID NO: 402 - protein, 85 aa, Homo sapiens [sequence omitted]

SEQ ID NO: 403 - protein, 82 aa, Homo sapiens
  SITE (15): Xaa equals any of the naturally occurring L-amino acids
MGGSLLPQVSAAVLXLDGLLLPGLKGCGPLRVSFPQAKFKAAALCEALLALGWRENFKLFCSQGRGMGPGCRCPHSANESFV

SEQ ID NO: 404 - protein, 286 aa, Homo sapiens
MAMEGYWRFLALLGSALLVGFLSVIFALVWVLHYREGLGWDGSALEFNWHPVLMVTGFVFIQGIAIIVYRLPWTWKCSKLLMKSIHAGLNAVAAILAIISVVAVFENHNVNNIANMYSLHSWVGLIAVICYLLQLLSGFSVFLLPWAPLSLRAFLMPIHVYSGIVIFGTVIATALMGLTEKLIFSLRDPAYSTFPPEGVFVNTLGLLILVFGALIFWIVTRPQWKRPKEPNSTILHPNGGTEQGARGSMPAYSGNNMDKSDSELNSEVAARKRNLALDEAGQRSTM

SEQ ID NO: 405 - protein, 154 aa, Homo sapiens
  SITE (68): Xaa equals any of the naturally occurring L-amino acids
  SITE (72): Xaa equals any of the naturally occurring L-amino acids
  SITE (83): Xaa equals any of the naturally occurring L-amino acids
  SITE (103): Xaa equals any of the naturally occurring L-amino acids
  SITE (110): Xaa equals any of the naturally occurring L-amino acids
  SITE (121): Xaa equals any of the naturally occurring L-amino acids
  SITE (123): Xaa equals any of the naturally occurring L-amino acids
  SITE (126): Xaa equals any of the naturally occurring L-amino acids
  SITE (134): Xaa equals any of the naturally occurring L-amino acids
  SITE (154): Xaa equals stop translation
MTKARLFRLWLVLGSVFMILLIIVYWDSAGAAHFYLHTSFSRPHTGPPLPTPGPDRDRELTADSDVDXFLDXFLSAGVKQSDXPRKETEQPPAPGSMEESVRXYDWSPRXARRTQTRAGSXRXGGXCCGASAPXPAWPSPPRSAHSTTSPTRSX

SEQ ID NO: 406 - protein, 37 aa, Homo sapiens [sequence omitted]

SEQ ID NO: 407 - protein, 60 aa, Homo sapiens [sequence omitted]

SEQ ID NO: 408 - protein, 447 aa, Homo sapiens
  SITE (447): Xaa equals stop translation
MLLGLLMAACFTFCLSHQNLKEFALTNPEKSSTKETERKETKAEEELDAEVLEVFHPTHEWQALQPGQAVPAGSHVRLNLQTGEREAKLQYEDKFRNNLKGKRLDINTNTYTSQDLKSALAKFKEGAEMESSKEDKARQAEVKRLFRPIEELKKDFDELNVVIETDMQIMVRLINKFNSSSSSLEEKIAALFDLEYYVHQMDNAQDLLSFGGLQVVINGLNSTEPLVKEYAAFVLGAAFSSNPKVQVEAIEGGALQKLLVILATEQPLTAKKKVLFALCSLLRHFPYAQRQFLKLGGLQVLRTLVQEKGTEVLAVRVVTLLYDLVTEKMFAEEEAELTQEMSPEKLQQYRQVHLLPGLWEQGWCEITAHLLALPEHDAREKVLQTLGVLLTTCRDRYRQDPQLGRTLASLQAEYQVLASLELQDGEDEGYFQELLGSVNSLLKELRX

SEQ ID NO: 409 - protein, 64 aa, Homo sapiens
MLYSDLKLVRCHNGPVHVISVYTTPPDPSNPYNTPPLFASCMVISYVTFTPVSADCFFNVLVCF

SEQ ID NO: 410 - protein, 24 aa, Homo sapiens
  SITE (24): Xaa equals stop translation
ELLFLLIIILGESLSDVILLICFX

SEQ ID NO: 411 - protein, 35 aa, Homo sapiens
  SITE (35): Xaa equals stop translation
MFYWGGLSFYFLLSSGVGFYCFLFGFGMEIWIAAX

SEQ ID NO: 412 - protein, 41 aa, Homo sapiens
MGKVGWLMVGGVAPGIRGGWGWTLGIMVGGAIAHCCCCLIR

SEQ ID NO: 413 - protein, 25 aa, Homo sapiens
  SITE (25): Xaa equals stop translation
MKLSLLILTLMQRYFRTITNSLCKX

SEQ ID NO: 414 - protein, 79 aa, Homo sapiens
  SITE (79): Xaa equals stop translation
MPAVSGPGPLFCLLLLLLDPHSPETGCPPLRRFEYKLSFKGPRLALPGAGIPFWSHHGGEGQGWGPLCPGSLKVLEGLX

SEQ ID NO: 415 - protein, 51 aa, Homo sapiens
  SITE (20): Xaa equals any of the naturally occurring L-amino acids
  SITE (28): Xaa equals any of the naturally occurring L-amino acids
MHYLLKECDIDTDAYFFFFXLLVLFLPXKYSPPFYSIVLFRWNDSYKISHY

SEQ ID NO: 416 - protein, 257 aa, Homo sapiens
  SITE (100): Xaa equals any of the naturally occurring L-amino acids
MAALTSHLQNQSNNSNWNLRTRSKCKKDVFMPPSSSSELQESRGLSNFTSTHLLLKEDEGVDDVNFRKVRKPKGKVTILKGIPIKKTKKGCRKSCSGFVXSDSKRESVCNKADAESEPVAQKSQLDRTVCISDAGACGETLSVTSEENSLVKKKERSLSSGSNFCSEQKTSGIINKFCSAKDSEHNEKYEDTFLESEEIGTKVEVVERKEHLHTDILKRGSEMDNNCSPTRKDFTEDTIPRNTDRKKENKPVFFQQI

SEQ ID NO: 417 - protein, 424 aa, Homo sapiens
  SITE (144): Xaa equals any of the naturally occurring L-amino acids
  SITE (263): Xaa equals any of the naturally occurring L-amino acids
MEKQCCSHPVICSLSTMYTFLLGAIFIALSSSRILLVKYSANEENKYDYLPTTVNVCSELVKLVFCVLVSFCVIKKDHQSRNLKYASWKEFSDFMKWSIPAFLYFLDNLIVFYVLSYLQPAMAVIFSNFSIITTALLFRIVLKXRLNWIQWASLLTLFLSIVALTAGTKTLQHNLAGRGFHHDAFFSPSNSCLLFRNECPRKDNCTAKEWTFPEAKWNTTARVFSHIRLGMGHVLIIVQCFISSMANIYNEKILKEGNQLTEXIFIQNSKLYFFGILFNGLTLGLQRSNRDQIKNCGFFYGHSAFSVALIFVTAFQGLSVAFILKFLDNMFHVLMAQVTTVIITTVSVLVFDFRPSLEFFLEAPSVLLSIFIYNASKPQVPEYAPRQERIRDLSGNLWERSSGDGEELERLTKPKSDESDEDTF

SEQ ID NO: 418 - protein, 33 aa, Homo sapiens
  SITE (33): Xaa equals stop translation
MWGQGSQKSHFSDLVFGVRELCAQPSDPGSPHX

SEQ ID NO: 419 - protein, 80 aa, Homo sapiens
  SITE (53): Xaa equals any of the naturally occurring L-amino acids
  SITE (80): Xaa equals stop translation
MVQHIQPAALSLLAQWSTLVQELEAALQLAFYPDAVEEWLEENVHPSLQRLQXLLQDLSEVSAPPLPPTSPGRDVAQDPX

SEQ ID NO: 420 - protein, 95 aa, Homo sapiens
  SITE (82): Xaa equals any of the naturally occurring L-amino acids
  SITE (83): Xaa equals any of the naturally occurring L-amino acids
  SITE (95): Xaa equals stop translation
MLNQGYIRKIILIIILGSFSSPKKAILMGFQNQKKALNEEQTTGVPMSISGKLRPSRSLDFVQPPRFQSQQPSAVVDRRGFXXKAARGQEFSESX

SEQ ID NO: 421 - protein, 257 aa, Homo sapiens
MRGPAQAKLLPGSAIQALVGLARPLVLALLLVSAALSSVVSRTDSPSPTVLNSHISTPNVNALTHENQTKPSISQISTTLPPTTSTKKSGGASVVPHPSPTPLSQEEADNNEDPSIEEEDLLMLNSSPSTAKDTLDNGDYGEPDYDWTTGPRDDDESDDTLEENRGYMEIEQSVKSFKMPSSNIEEEDSHFFFHLIIFAFCIAVVYITYHNKRKIFLLVQSRKWRDGLCSKTVEYHRLDQNVNEAMPSLKITNDYIF

SEQ ID NO: 422 - protein, 704 aa, Homo sapiens
MWYRLRLLKPQPNIIPTVKKIVLLAGWALFLFLAYKVSKTDREYQEYNPYEVLNLDPGATVAEIKKQYRLLSLKYHPDKGGDEVMFMRIAKAYAALTDEESRKNWEEFGNPDGPQATSFGIALPAWIVDQKNSILVLLVYGLAFMVILPVVVGSWWYRSIRYSGDQILIRTTQIYTYFVYKTRNMDMKRLIMVLAGASEFDPQYNKDATSRPTDNILIPQLIREIGSINLKKNEPPLTCPYSLKARVLLLSHLARMKIPETLEEDQQFMLKKCPALLQEMVNVICQLIVMARNREEREFRAPTLASLENCMKLSQMAVQGLQQFKSPLLQLPHIEEDNLRRVSNHKKYKIKTIQDLVSLKESDRHTLLHFLEDEKYEEVMAVLGSFPYVTMDIKSQVLDDEDSNNITVGSLVTVLVKLTRQTMAEVFEKEQSICAAEEQPAEDGQGETNKNRTKGGWQQKSKGPKKTAKSKKKKPLKKKPTPVLLPQSKQQKQKQANGVVGNEAAVKEDEEEVSDKGSDSEEEETNRDSQSEKDDGSDRDSDREQDEKQNKDDEAEWQELQQSIQRKERALLETKSKITHPVYSLYFPEEKQEWWWLYIADRKEQTLISMPYHVCTLKDTEEVELKFPAPGKPGNYQYTVFLRSDSYMGLDQIKPLKLEVHEAKPVPENHPQWDTAIEGDEDQEDSEGFEDSFEEEEEEEEDDD

SEQ ID NO: 423 - protein, 190 aa, Homo sapiens
  SITE (29): Xaa equals any of the naturally occurring L-amino acids
  SITE (31): Xaa equals any of the naturally occurring L-amino acids
MKASQCCCCLSHLLASVLLLLLLPELSGXLXVLLQAAEAAPGLGPPDPRPRTLPPLPPGPTPAQQPGRGLAEAAGPRGSEGGNGSNPVAGLETDDHGGKAGEGSVGGGLAVSPNPGDKPMTQRALTVLMVVSGAVLVYFVVRTVRMRRRNRKTRRYGVLDTNIENMELTPLEQDDEDDDNTLFDANHPRR

SEQ ID NO: 424 - protein, 179 aa, Homo sapiens
  SITE (179): Xaa equals stop translation
MSPSGRLCLLTIVGLILPTRGQTLKDTTSSSSADSTIMDIQVPTRAPDAVYTELQPTSPTPTWPADETPQPQTQTQQLEGTDGPLVTDPETHKSTKAAHPTDDTTTLSERPSPSTDVQTDPQTLKPSGFHEDDPFFYDEHTLRKRGLLVAAVLFITGIIILTSGKCRQLSRLCRNHCRX

SEQ ID NO: 425 - protein, 40 aa, Homo sapiens
MFKCLQTTFLFILDFTWESKVQFHKASVYLSLSIYIDCHA

SEQ ID NO: 426 - protein, 232 aa, Homo sapiens
MLAGKLIPVHQVRGLKEKIVRSFEVSPDGSFLLINGIAGYLHLLAMKTKELIGSMKINGRVAASTFSSDSKKVYASSGDGEVYVWDVNSRKCLNRFVDEGSLYGLSIATSRNGQYVACGSNCGVVNIYNQDSCLQETNPKPIKAIMNLVTGVTSLTFNPTTEILAIASEKMKEAVRLVHLPSCTVFSNFPVIKNKNISHVHTMDFSPRSGYFALGNEKGKALMYRLHHYSDF

SEQ ID NO: 427 - protein, 250 aa, Homo sapiens
MRILQLILLALATGLVGGETRIIKGFECKPHSQPWQAALFEKTRLLCGATLIAPRWLLTAAHCLKPRYIVHLGQHNLQKEEGCEQTRTATESFPHPGFNNSLPNKDHRNDIMLVKMASPVSITWAVRPLTLSSRCVTAGTSCLISGWGSTSSPQLRLPHTLRCANITIIEHQKCENAYPGNITDTMVCASVQEGGKDSCQGDSGGPLVCNQSLQGIISWGQDPCAITRKPGVYTKVCKYVDWIQETMKNN

SEQ ID NO: 428 - protein, 58 aa, Homo sapiens
MWTKNDKLKKFFFLRYLQNMVYFYVEKKSYEGSCYFKRKFIKSPRGMKMTACFSIILA

SEQ ID NO: 429 - protein, 219 aa, Homo sapiens
  SITE (61): Xaa equals any of the naturally occurring L-amino acids
  SITE (105): Xaa equals any of the naturally occurring L-amino acids
  SITE (117): Xaa equals any of the naturally occurring L-amino acids
  SITE (219): Xaa equals stop translation
MAVVLLANLAQGDSLAARAIAVQKGSIGNLLGFLEDSLAATQFQQSQASLLHMQNPPFEPXSVDMMRRAARALLALAKVDENHSEFTLYESRLLDISVSPLMNSXVSQVICDVLFLXWPVMTAVGHLPPPCVCACVENLETDCCPLFMQNHLRIQFTLCCPASPLGKSLSCFSLLLPPPLPPSPHAFLFLVLTLLPSGPYPTLFEKTKLCLHRRLFLFX

SEQ ID NO: 430 - protein, 51 aa, Homo sapiens
  SITE (51): Xaa equals stop translation
MLPDESFGLLLSIPSLTPSAAAPSFCVHLMQASRSSKRASHVPVHLLWGDX

SEQ ID NO: 431 - protein, 50 aa, Homo sapiens
  SITE (27): Xaa equals any of the naturally occurring L-amino acids
  SITE (50): Xaa equals stop translation
MRPGSFSFIAFLATEVSSCFPGRPDCXTGMWLLQLQKKQRTLLAMAPRRX

SEQ ID NO: 432 - protein, 70 aa, Homo sapiens
  SITE (33): Xaa equals any of the naturally occurring L-amino acids
  SITE (39): Xaa equals any of the naturally occurring L-amino acids
  SITE (55): Xaa equals any of the naturally occurring L-amino acids
  SITE (70): Xaa equals stop translation
DRPCPSSLWKVFPLLLLLMRLFPLPVPGNQRAXLPHPFXAPRLPCLLCLCTQQFXVCSHYLPAGYRVNSX

SEQ ID NO: 433 - protein, 40 aa, Homo sapiens
  SITE (40): Xaa equals stop translation
MHEKAWNLILLWWLSLDLLGVAKTAMWAQWCGLNDHKGKX

SEQ ID NO: 434 - protein, 104 aa, Homo sapiens
MAFVLLFCFVGLQSSRAGPYSELVLCQTPASAPDPVSTLCVLEEEPLDAYPDSPSACLVLNWEEPCNNGSEILAYTIDLGDTSITVGNTTMHVMKDLLPETTYR

SEQ ID NO: 435 - protein, 38 aa, Homo sapiens
  SITE (38): Xaa equals stop translation
MFSLLWLVCVPSNSSVANVTASRGGVFKRSLGHEGFSX

SEQ ID NO: 436 - protein, 35 aa, Homo sapiens
  SITE (35): Xaa equals stop translation
KWLLFIFLLCLQLVNALLSLFQERFVHCPARFVSX

SEQ ID NO: 437 - protein, 32 aa, Homo sapiens
  SITE (32): Xaa equals stop translation
MLLFLSITNSLSFISVDKPFGQSEDVCPVISX

SEQ ID NO: 438 - protein, 127 aa, Homo sapiens
  SITE (127): Xaa equals stop translation
MEFLFNKTGWAFAALCFVLAMTSGQMWNHIRGPPYAHKNPHTGHVNYIHGSSQAQFVAETHIVLLFNGGVTLGMVLLCEAATSDMDIGKRKIMCVAGIGLVVLFFSWMLSIFRSKYHGYPYSFLMSX

SEQ ID NO: 439 - protein, 69 aa, Homo sapiens
  SITE (10): Xaa equals any of the naturally occurring L-amino acids
  SITE (69): Xaa equals stop translation
MTWHSRESFXLLRVVAPSQAPGMQVSPSQRAWRRPLHRCHVAAPRPHHFAFFRNPFSWSFIKLLYRYLX

SEQ ID NO: 440 - protein, 92 aa, Homo sapiens
  SITE (92): Xaa equals stop translation
MGLKLNGRYISLILAVQIAYLVQAVRAAGKCDAVFKGFSDCLLKLGDTWPTTRSLGRQDEHQDRVHILGGFPQLHGHSPYGLPGRGERYVGX

SEQ ID NO: 441 - protein, 380 aa, Homo sapiens
  SITE (264): Xaa equals any of the naturally occurring L-amino acids
  SITE (296): Xaa equals any of the naturally occurring L-amino acids
  SITE (380): Xaa equals stop translation
MARRSAFPAAALWLWSILLCLLALRAEAGPPQEESLYLWIDAHQARVLIGFEEDILIVSEGKMAPFTHDFRKAQQRMPAIPVNIHSMNFTWQAAGQAEYFYEFLSLRSLDKGIMADPTVNVPLLGTVPHKASVVQVGFPCLGKQDGVAAFEVDVIVMNSEGNTILQTPQNAIFFKTCQQAECPGGCRNGGFCNERRICECPDGFHGPHCEKALCTPRCMNGGLCVTPGFCICPPGFYGVNCDKANCSTTCFNGGTCFYPGKCIXPPGLEGEQCEISKCPQPCRNGGKCIGKSKCKXSKGYQGDLCSKPVCEPGCGAHGTCHEPNKCQCQEGWHGRHCNKRYEASLIHALRPAGAQLRQHTPSLKKAEERRDPPESNYIWX

SEQ ID NO: 442 - protein, 24 aa, Homo sapiens
  SITE (17): Xaa equals any of the naturally occurring L-amino acids
  SITE (21): Xaa equals any of the naturally occurring L-amino acids
  SITE (23): Xaa equals any of the naturally occurring L-amino acids
  SITE (24): Xaa equals stop translation
MTSNLLLLTLLLKDTLXLAKXNXX

SEQ ID NO: 443 - protein, 47 aa, Homo sapiens
  SITE (33): Xaa equals any of the naturally occurring L-amino acids
  SITE (47): Xaa equals stop translation
MRHHTQLNFIFLVEMVFLHVGQAGLKLPTSGDXACFGLPKVLGLQAX

SEQ ID NO: 444 - protein, 214 aa, Homo sapiens
MQVTITLTSPIIREENMREGDVTSGMVKDPPDVLDRQKCLDALAALRHAKWFQARANGLQSCVIIIRILRDLCQRVPTWSDFPSWAMELLVEKAISSASSPQSPGDALRRVFECISSGIILKGSPGLLDPCEKDPFDTLATMTDQQREDITSSAQFALRLLAFRQIHKVLGMDPLPQMSQRFNIHNNRKRRRDSDGVDGFEAEGKKDKKDYDNF

SEQ ID NO: 445 - protein, 144 aa, Homo sapiens
  SITE (144): Xaa equals stop translation
LLSILLCLLASGLVVFFLFPHSVLVDDDGIKVVKVTFNKQDSLVILTIMATLKIRNSNFYTVAVTSLSSQIQYMNTVVNFTGKAEMGGPFSYVYFFCTVPEILVHNIVIFMRTSVKISYIGLMTQSSLETHHYVDCGGNSTAIX

SEQ ID NO: 446 - protein, 37 aa, Homo sapiens
  SITE (37): Xaa equals stop translation
MFFFLYVYSVLCGLLVYPSLPSHSVSLVTSLVASALX

SEQ ID NO: 447 - protein, 37 aa, Homo sapiens
  SITE (31): Xaa equals any of the naturally occurring L-amino acids
  SITE (37): Xaa equals stop translation
MASINAVYIHVFLGVCVQATAACPWCSQCRXGSVPSX

SEQ ID NO: 448 - protein, 192 aa, Homo sapiens
  SITE (47): Xaa equals any of the naturally occurring L-amino acids
  SITE (192): Xaa equals stop translation
MMAAMVLTSLSCSPVVQSPPGTEANFSASRAACDPWKESGDISDSGXSTTSGHWSGSSGVSTPSPPHPQASPKYLGDAFGSPQTDHGFETDPDPFLLDEPAPRKRKNSVKVMYKCLWPNCGKVLRSIVGIKRHVKALHLGDTVDSDQFKREEDFYYTEVQLKEESAAAAAAAAADPQSLGLPPPSQLPPPAX

SEQ ID NO: 449 - protein, 31 aa, Homo sapiens
  SITE (31): Xaa equals stop translation
MSTNYLTDVCSLFSYLNYLYFHHHLPVPNTX

SEQ ID NO: 450 - protein, 101 aa, Homo sapiens
  SITE (44): Xaa equals any of the naturally occurring L-amino acids
  SITE (46): Xaa equals any of the naturally occurring L-amino acids
  SITE (77): Xaa equals any of the naturally occurring L-amino acids
  SITE (78): Xaa equals any of the naturally occurring L-amino acids
  SITE (101): Xaa equals stop translation
MGFFFVLFFLYLALSRDWSINFLKDHRINFFVATSYFSVYVRGXPXVPADTPLGPLLSLWLHHNAFFSILPKFPENXXFLILKKLVVEMGWDLFISPENKX

SEQ ID NO: 451 - protein, 37 aa, Homo sapiens
  SITE (37): Xaa equals stop translation
MARYFIFFILVFMKVSLNTTWPAPRPATLRTANKSKX

SEQ ID NO: 452 - protein, 42 aa, Homo sapiens
  SITE (42): Xaa equals stop translation
FSTIRSGLTDRSVNFLFLFLDVPDCRLVNIELMANSTVTHAX

SEQ ID NO: 453 - protein, 48 aa, Homo sapiens [sequence omitted]

SEQ ID NO: 454 - protein, 25 aa, Homo sapiens
  SITE (25): Xaa equals stop translation
MPWRRAGLMMLPIITGCCPCSASIX

SEQ ID NO: 455 - protein, 54 aa, Homo sapiens [sequence omitted]

SEQ ID NO: 456 - protein, 42 aa, Homo sapiens
  SITE (42): Xaa equals stop translation
MTALVWRKGPDGGSRKPILLLFFFLPLILCFHSFIHSSNICX

SEQ ID NO: 457 - protein, 66 aa, Homo sapiens
  SITE (15): Xaa equals any of the naturally occurring L-amino acids
  SITE (66): Xaa equals stop translation
MFLTTWFLLLSVAWXALTRSGRSCLPLVGRPREQSPRTHCAASSTKERNSDPQPSPPEVVGPLWSX

SEQ ID NO: 458 - protein, 156 aa, Homo sapiens
MKAIGIEPSLATYHHIIRLFDQPGDPLKRSSFIIYDIMNELMGKRFSPKDPDDDKFFQSAMSICSSLRDLELAYQVHGLLKTGDNWKFIGPDQHRNFYYSKFFDLICLMEQIDVTLKWYEDLIPSAYFPHSQTMIHLLQALDVANRLEVIPKIWER

SEQ ID NO: 459 - protein, 31 aa, Homo sapiens
  SITE (31): Xaa equals stop translation
MNDNSPNHSSSYLPLPLTIVILQTGHKGTLX

SEQ ID NO: 460 - protein, 57 aa, Homo sapiens
  SITE (57): Xaa equals stop translation
MHFLFRFIVFFYLWGLFTAQRQKKEESTEEVKIEVLHRPENCSKTSKKGDLLKCPLX

SEQ ID NO: 461 - protein, 416 aa, Homo sapiens
  SITE (338): Xaa equals any of the naturally occurring L-amino acids
  SITE (416): Xaa equals stop translation
MRTLFNLLWLALACSPVHTTLSKSDAKKAASKTLLEKSQFSDKPVQDRGLVVTDLKAESVVLEHRSYCSAKARDRHFAGDVLGYVTPWNSHGYDVTKVFGSKFTQISPVWLQLKRRGREMFEVTGLHDVDQGWMRAVRKHAKGLHIVPRLLFEDWTYDDFRNVLDSEDEIEELSKTVVQVAKNQHFDGFVVEVWNQLLSQKRVGLIHMLTHLAEALHQARLLALLVIPPAITPGTDQLGMFTHKEFEQLAPVLDGFSLMTYDYSTAHQPGPNAPLSWVRACVQVLDPKSKWRSKILLGLNFYGMDYATSKDAREPVVGARYIQTLKDHRPRMVWDSQXSEHFFEYKKSRSGRHVVFYPTLKSLQVRLELARELGVGVSIWELARAWTTSTTCSRWALRPPRWTCSFLSHGVSEQVX

SEQ ID NO: 462 - protein, 64 aa, Homo sapiens
  SITE (56): Xaa equals any of the naturally occurring L-amino acids
MAPGPLSATQAVVIHTTHCLQLPVWCLSLVSELLGRAPPHNKDALRPSKKKKKKLXGGPVPIPP

SEQ ID NO: 463 - protein, 206 aa, Homo sapiens
  SITE (80): Xaa equals any of the naturally occurring L-amino acids
  SITE (93): Xaa equals any of the naturally occurring L-amino acids
  SITE (206): Xaa equals stop translation
MLGAKPHWLPGPLHSPGLPLVLVLLALGAGWAQEGSEPVLLEGECLVVCEPGRAAAGGPGGAALGEAPPGRVAFAAVRSXHHEPAGETGNGTXGAIYFDQVLVNEGGGFDRASGSFVAPVRGVYSFRFHVVKVYNRQTVQVSLMLNTWPVISAFANDPDVTREAATSSVLLPLDPGDRVSLRLRRGNLLGGWKYSSFSGFLIFPLX

SEQ ID NO: 464 - protein, 38 aa, Homo sapiens
  SITE (38): Xaa equals stop translation
MQRKVSDFIIHQRLTVNLCVISFFFFLPICIFSLAKKX

SEQ ID NO: 465 - protein, 136 aa, Homo sapiens
  SITE (136): Xaa equals stop translation
VVGTGTSLALSSLLSLLLFAGMQMYSRQLASTEWLTIQGGLLGSGLFVFSLTAFNNLENLVFGKGFQAKIFPEILLCLLLALFASGLIHRVCVTTCFIFSMVGLYYINKISSTLYQAAAPVLTPAKVTGKSKKRNX

SEQ ID NO: 466 - protein, 50 aa, Homo sapiens
  SITE (17): Xaa equals any of the naturally occurring L-amino acids
  SITE (18): Xaa equals any of the naturally occurring L-amino acids
  SITE (25): Xaa equals any of the naturally occurring L-amino acids
  SITE (50): Xaa equals stop translation
MCLSRWKIFYTLLILFXXFSITSEXETFYMIIIHHNPTQITASCSFTFLX

SEQ ID NO: 467 - protein, 71 aa, Homo sapiens
  SITE (27): Xaa equals any of the naturally occurring L-amino acids
  SITE (49): Xaa equals any of the naturally occurring L-amino acids
  SITE (71): Xaa equals stop translation
MWGCSGLGHRTVSFLLLLPCSFPRPCXLFGLIPISRPCKVEAPRLSVPXLSCASHPYCNCPMSTSCPLPRX

SEQ ID NO: 468 - protein, 59 aa, Homo sapiens
  SITE (59): Xaa equals stop translation
DFVPVLVFVLIKANPPCLLSTVQYISSFYASCLSGEESYWWMQFTAAVEFIKTIDDRKX

SEQ ID NO: 469 - protein, 59 aa, Homo sapiens
  SITE (27): Xaa equals any of the naturally occurring L-amino acids
  SITE (34): Xaa equals any of the naturally occurring L-amino acids
  SITE (35): Xaa equals any of the naturally occurring L-amino acids
  SITE (37): Xaa equals any of the naturally occurring L-amino acids
  SITE (38): Xaa equals any of the naturally occurring L-amino acids
  SITE (46): Xaa equals any of the naturally occurring L-amino acids
  SITE (59): Xaa equals any of the naturally occurring L-amino acids
MFSRTSNFWTFFFQFLIFKVFLVLKNXFTSQKIXXIXXEKPKKKKXRGGRAPSPQGGPX

SEQ ID NO: 470 - protein, 18 aa, Homo sapiens
  SITE (18): Xaa equals stop translation
MGLLIFMLLIGIHSQCSX

SEQ ID NO: 471 - protein, 316 aa, Homo sapiens
  SITE (103): Xaa equals any of the naturally occurring L-amino acids
  SITE (302): Xaa equals any of the naturally occurring L-amino acids
  SITE (305): Xaa equals any of the naturally occurring L-amino acids
  SITE (316): Xaa equals stop translation
MSTKKLCIVGGILLVFQIIAFLVGGLIAPGPTTAVSYMSVKCVDARKNHHKTKWFVPWGPNHCDKIRDIEEAIPREIEANDIVFSVHIPLPHMEMSPWFQFMXFILQLDIAFKLNNQIRENAEVSMDVSLAYRDDAFAEWTEMAHERVPRKLKCTFTSPKTPEHGGPVTMNVMSFLSWKLGLWPMKFYLLNIRLPVNEKKKINVGIGEIKDIRLVGIHQNGGFTKVWFAMKTFLTPSIFIIMVWYWRRITMMSRPPVLLEKVIFALGISMTFINIPVEWFSIGFDWTWMLLFGDIRQASSMXCFXPSGSSSVASTX

SEQ ID NO: 472 - protein, 24 aa, Homo sapiens
  SITE (24): Xaa equals stop translation
MLALLGLLAGTEHPPGPQGPGPSX

SEQ ID NO: 473 - protein, 10 aa, Homo sapiens
  SITE (10): Xaa equals stop translation
MPSGACCSPX

SEQ ID NO: 474 - protein, 85 aa, Homo sapiens
  SITE (36): Xaa equals any of the naturally occurring L-amino acids
  SITE (44): Xaa equals any of the naturally occurring L-amino acids
  SITE (85): Xaa equals stop translation
YVMIFKKEFAPSDEELDSYRRGEEWDPQKAEEKRNXKELAQRQXGGGSPAGACGGEPCQRLQGQVQPPHRQGSSQRRSPHATGQX

SEQ ID NO: 475 - protein, 26 aa, Homo sapiens
  SITE (26): Xaa equals stop translation
MLPALSTVLLPTPSLCSGNPREGWAX

SEQ ID NO: 476 - protein, 34 aa, Homo sapiens
  SITE (34): Xaa equals stop translation
KEFFVFLFVCLFWLLSNTPLTFISIILQRKETNX

SEQ ID NO: 477 - protein, 172 aa, Homo sapiens
  SITE (151): Xaa equals any of the naturally occurring L-amino acids
  SITE (172): Xaa equals stop translation
MYSLHSWVGLIAVICYLLQLLSGFSVFLLPWAPLSLRAFLMPIHVYSGIVIFGTVIATALMGLTEKLIFSLRDPAYSTFPPEGVFVNTLGLLILVFGALIFWIVTRPQWKRPKEPNSTILHPNGGTEQGARGSMPAYSGNNMDKSDSELNXEVAARKRNLALDEAGQRSTMX

SEQ ID NO: 478 - protein, 61 aa, Homo sapiens
  SITE (8): Xaa equals any of the naturally occurring L-amino acids
  SITE (27): Xaa equals any of the naturally occurring L-amino acids
  SITE (61): Xaa equals stop translation
MCIHVFMXVLWVLFLLNPLCTGLWPLXNCFSVLRHADWVLGADYKGEELNRHQGPMKPKDX

SEQ ID NO: 479 - protein, 3 aa, Homo sapiens
  SITE (3): Xaa equals stop translation
GRX

SEQ ID NO: 480 - protein, 96 aa, Homo sapiens
  SITE (11): Xaa equals any of the naturally occurring L-amino acids
  SITE (35): Xaa equals any of the naturally occurring L-amino acids
  SITE (38): Xaa equals any of the naturally occurring L-amino acids
  SITE (96): Xaa equals stop translation
MFHVLMAQVTXVIITTVSVLVFDFRPSLEFFLEAXSVXLSIFIYNASKPQVPEYAPRQERIRDLSGNLWERSSGDGEELERLTKPKSDESDEDTFX

SEQ ID NO: 481 - protein, 171 aa, Homo sapiens
  SITE (159): Xaa equals any of the naturally occurring L-amino acids
  SITE (171): Xaa equals stop translation
MRGPAQAKLLPGSAIQALVGLARPLVLALLLVSAALSSVVSRTDSPSPTVLNSHISTPNVNALTHENQTKPSISQISTTLPPTTSTKKSGGASVVPHPSPTPLSQEEADNNEDPSIEEEDLLMLNSSPSTAKDTLDNGDYGEPDYDWTTGPRDDDESDXHLGRKQGLHGNX

SEQ ID NO: 482 - protein, 623 aa, Homo sapiens
  SITE (111): Xaa equals any of the naturally occurring L-amino acids
  SITE (575): Xaa equals any of the naturally occurring L-amino acids
MFMRIAKAYAALTDEESRKNWEEFGNPDGPQATSFGIALPAWIVDQKNSILVLLVYGLAFMVILPVVVGSWWYRSIRYSGDQILIRTTQIYTYFVYKTRNMDMKRLIMVLXGASEFDPQYNKDATSRPTDNILIPQLIREIGSINLKKNEPPLTCPYSLKARVLLLSHLARMKIPETLEEDQQFMLKKCPALLQEMVNVICQLIVMARNREEREFRAPTLASLENCMKLSQMAVQGLQQFKSPLLQLPHIEEDNLRRVSNHKKYKIKTIQDLVSLKESDRHTLLHFLEDEKYEEVMAVLGSFPYVTMDIKSQVLDDEDSNNITVGSLVTVLVKLTRQTMAEVFEKEQSICAAEEQPAEDGQGETNKNRTKGGWQQKSKGPKKTAKSKKKKPLKKKPTPVLLPQSKQQKQKQANGVVGNEAAVKEDEEEVSDKGSDSEEEETNRDSQSEKDDGSDRDSDREQDEKQNKDDEAEWQELQQSIQRKERALLETKSKITHPVYSLYFPEEKQEWWWLYIADRKEQTLISMPYHVCTLKDTEEVELKFPAPGKPGNYQYTVFLRSDSYMGLDQIKPLEVXKFMRLKPVPENHPQWDTAIEGDEDQEDSEGFEDSFEGGRGREEGRWWT

SEQ ID NO: 483 - protein, 92 aa, Homo sapiens
  SITE (29): Xaa equals any of the naturally occurring L-amino acids
  SITE (31): Xaa equals any of the naturally occurring L-amino acids
  SITE (43): Xaa equals any of the naturally occurring L-amino acids
  SITE (92): Xaa equals stop translation
MKASQCCCCLSHLLASVLLLLLLPELSGXLXVLLQAAEAAPGXGPPDPRPGHYRRCHRALTPAQQPGRGLAEAAGAAGLRGRQWQQPCGRAX

SEQ ID NO: 484 - protein, 14 aa, Homo sapiens
  SITE (13): Xaa equals any of the naturally occurring L-amino acids
  SITE (14): Xaa equals stop translation
MFKCLQTTFLFIXX

SEQ ID NO: 485 - protein, 54 aa, Homo sapiens
  SITE (54): Xaa equals stop translation
ILLCSWPTGLVGGRDPGSSRGSSASLTPSPGRQPCSRRRGYSVGRRSSPPDGSX

SEQ ID NO: 486 - protein, 22 aa, Homo sapiens
  SITE (7): Xaa equals any of the naturally occurring L-amino acids
  SITE (11): Xaa equals any of the naturally occurring L-amino acids
  SITE (16): Xaa equals any of the naturally occurring L-amino acids
  SITE (22): Xaa equals stop translation
MAFVLLXCFVXLQSSXGRAVQX

SEQ ID NO: 487 - protein, 19 aa, Homo sapiens
ENMICVKCLPQYPEHSKHV

SEQ ID NO: 488 - protein, 20 aa, Homo sapiens [sequence omitted]

SEQ ID NO: 489 - protein, 20 aa, Homo sapiens
ELVESPGAAGNSARSGNVVC

SEQ ID NO: 490 - protein, 25 aa, Homo sapiens
  SITE (9): Xaa equals any of the naturally occurring L-amino acids
FKKLVNPRXQGIRHEEEAVSWQERR

SEQ ID NO: 491 - protein, 206 aa, Homo sapiens
  SITE (5): Xaa equals any of the naturally occurring L-amino acids
ISVLXYPHCVVHELPELTAESLEAGDSNQFCWRNLFSCINLLRILNKLTKWKHSRTMMLVVFKSAPILKRALKVKQAMMQLYVLKLLKVQTKYLGRQWRKSNMKTMSAIYQKVRHRLNDDWAYGNDLDARPWDFQAEECALRANIERFNARRYDRAHSNPDFLPVDNCLQSVLGQRVDLPEDFQMNYDLWLEREVFSKPISWEELL

SEQ ID NO: 492 - protein, 507 aa, Homo sapiens
  SITE (87): Xaa equals any of the naturally occurring L-amino acids
  SITE (95): Xaa equals any of the naturally occurring L-amino acids
MRAASPPASASDLIEQQQKRGRREHKALIKQDNLDAFNERDPYKADDSREEEEENDDDNSLEGETFPLERDEVMPPPLQHPQTDRLXCPKGLPWXPKVREKDIEMFLESSRSKFIGYTLGSDTNTVVGLPRPIHESIKTLKQHKYTSIAEVQAQMEEEYLRSPLSGGEEEVEQVPAETLYQGLLPSLPQYMIALLKILLAAAPTSKAKTDSINILADVLPEEMPTTVLQSMKLGVDVNRHKEVIVKAISAVLLLLLKHFKLNHVYQFEYMAQHLVFANCIPLILKFFNQNIMSYITAKNSISVLDYPHCVVHELPELTAESLEAGDSNQFCWRNLFSCINLLRILNKLTKWKHSRTMMLVVFKSAPILKRALKVKQAMMQLYVLKLLKVQTKYLGRQWRKSNMKTMSAIYQKVRHRLNDDWAYGNDLDARPWDFQAEECALRANIERFNARRYDRAHSNPDFLPVDNCLQSVLGQRVDLPEDFQMNYDLWLEREVFSKPISWEELLQ

SEQ ID NO: 493 - protein, 50 aa, Homo sapiens
MRAASPPASASDLIEQQQKRGRREHKALIKQDNLDAFNERDPYKADDSRE

SEQ ID NO: 494 - protein, 45 aa, Homo sapiens
  SITE (37): Xaa equals any of the naturally occurring L-amino acids
  SITE (45): Xaa equals any of the naturally occurring L-amino acids
EEEENDDDNSLEGETFPLERDEVMPPPLQHPQTDRLXCPKGLPWX

SEQ ID NO: 495 - protein, 51 aa, Homo sapiens
PKVREKDIEMFLESSRSKFIGYTLGSDTNTVVGLPRPIHESIKTLKQHKYT

SEQ ID NO: 496 - protein, 47 aa, Homo sapiens
SIAEVQAQMEEEYLRSPLSGGEEEVEQVPAETLYQGLLPSLPQYMIA

SEQ ID NO: 497 - protein, 48 aa, Homo sapiens
LLKILLAAAPTSKAKTDSINILADVLPEEMPTTVLQSMKLGVDVNRHK

SEQ ID NO: 498 - protein, 50 aa, Homo sapiens
EVIVKAISAVLLLLLKHFKLNHVYQFEYMAQHLVFANCIPLILKFFNQNI

SEQ ID NO: 499 - protein, 48 aa, Homo sapiens
MSYITAKNSISVLDYPHCVVHELPELTAESLEAGDSNQFCWRNLFSCI

SEQ ID NO: 500 - protein, 47 aa, Homo sapiens
NLLRILNKLTKWKHSRTMMLVVFKSAPILKRALKVKQAMMQLYVLKL

SEQ ID NO: 501 - protein, 45 aa, Homo sapiens
LKVQTKYLGRQWRKSNMKTMSAIYQKVRHRLNDDWAYGNDLDARP

SEQ ID NO: 502 - protein, 48 aa, Homo sapiens
WDFQAEECALRANIERFNARRYDRAHSNPDFLPVDNCLQSVLGQRVDL

SEQ ID NO: 503 - protein, 28 aa, Homo sapiens
PEDFQMNYDLWLEREVFSKPISWEELLQ

SEQ ID NO: 504 - protein, 317 aa, Homo sapiens
  SITE (39): Xaa equals any of the naturally occurring L-amino acids
  SITE (40): Xaa equals any of the naturally occurring L-amino acids
  SITE (112): Xaa equals any of the naturally occurring L-amino acids
MAPPAPGPASGGSGEVDELFDVKNAFYIGSYQQCINEAXXVKLSSPERDVERDVFLYRAYLAQRKFGVVLDEIKPSSAPELQAVRMFADYLAHESRRDSIVAELDREMSRSXDVTNTTFLLMAASIYLHDQNPDAALRALHQGDSLECTAMTVQILLKLDRLDLARKELKRMQDLDEDATLTQLATAWVSLATGGEKLQDAYYIFQEMADKCSPTLLLLNGQAACHMAQGRWEAAEGLLQEALDKDSGYPETLVNLIVLSQHLGKPPEVTNRYLSQLKDAHRSHPFIKEYQAKENDFDRLVLQYAPSAEAGPELSGP

SEQ ID NO: 505 - protein, 261 aa, Homo sapiens
  SITE (65): Xaa equals any of the naturally occurring L-amino acids
RDVERDVFLYRAYLAQRKFGVVLDEIKPSSAPELQAVRMFADYLAHESRRDSIVAELDREMSRSXDVTNTTFLLMAASIYLHDQNPDAALRALHQGDSLECTAMTVQILLKLDRLDLARKELKRMQDLDEDATLTQLATAWVSLATGGEKLQDAYYIFQEMADKCSPTLLLLNGQAACHMAQGRWEAAEGLLQEALDKDSGYPETLVNLIVLSQHLGKPPEVTNRYLSQLKDAHRSHPFIKEYQAKENDFDRLVLQYAPSA

SEQ ID NO: 506 - protein, 48 aa, Homo sapiens
  SITE (39): Xaa equals any of the naturally occurring L-amino acids
  SITE (40): Xaa equals any of the naturally occurring L-amino acids
MAPPAPGPASGGSGEVDELFDVKNAFYIGSYQQCINEAXXVKLSSPER

SEQ ID NO: 507 - protein, 47 aa, Homo sapiens
DVERDVFLYRAYLAQRKFGVVLDEIKPSSAPELQAVRMFADYLAHES

SEQ ID NO: 508 - protein, 48 aa, Homo sapiens
  SITE (17): Xaa equals any of the naturally occurring L-amino acids
RRDSIVAELDREMSRSXDVTNTTFLLMAASIYLHDQNPDAALRALHQG

SEQ ID NO: 509 - protein, 47 aa, Homo sapiens
DSLECTAMTVQILLKLDRLDLARKELKRMQDLDEDATLTQLATAWVS

SEQ ID NO: 510 - protein, 47 aa, Homo sapiens
LATGGEKLQDAYYIFQEMADKCSPTLLLLNGQAACHMAQGRWEAAEG

SEQ ID NO: 511 - protein, 48 aa, Homo sapiens
LLQEALDKDSGYPETLVNLIVLSQHLGKPPEVTNRYLSQLKDAHRSHP

SEQ ID NO: 512 - protein, 32 aa, Homo sapiens
FIKEYQAKENDFDRLVLQYAPSAEAGPELSGP

SEQ ID NO: 513 - protein, 47 aa, Homo sapiens
RDVERDVFLYRAYLAQRKFGVVLDEIKPSSAPELQAVRMFADYLAHE

SEQ ID NO: 514 - protein, 48 aa, Homo sapiens
  SITE (18): Xaa equals any of the naturally occurring L-amino acids
SRRDSIVAELDREMSRSXDVTNTTFLLMAASIYLHDQNPDAALRALHQ

SEQ ID NO: 515 - protein, 47 aa, Homo sapiens
GDSLECTAMTVQILLKLDRLDLARKELKRMQDLDEDATLTQLATAWV

SEQ ID NO: 516 - protein, 47 aa, Homo sapiens
SLATGGEKLQDAYYIFQEMADKCSPTLLLLNGQAACHMAQGRWEAAE

SEQ ID NO: 517 - protein, 38 aa, Homo sapiens
GLLQEALDKDSGYPETLVNLIVLSQHLGKPPEVTNRYL

SEQ ID NO: 518 - protein, 34 aa, Homo sapiens
SQLKDAHRSHPFIKEYQAKENDFDRLVLQYAPSA

SEQ ID NO: 519 - protein, 62 aa, Homo sapiens
NRYYRESWSLQVPVRNSGSTHASERNGASGPRPGLRRLRGGRRAVRRKERLLHRQLPAVHKR

SEQ ID NO: 520 - protein, 66 aa, Homo sapiens
  SITE (4): Xaa equals any of the naturally occurring L-amino acids
APGXGWRGSLGEPPPPPRASLSSDTSALSYDSVKYTLVVDEHAQLELVSLRRASETTVTRVTLPPS

SEQ ID NO: 521 - protein, 30 aa, Homo sapiens
  SITE (4): Xaa equals any of the naturally occurring L-amino acids
APGXGWRGSLGEPPPPPRASLSSDTSALSY

SEQ ID NO: 522 - protein, 36 aa, Homo sapiens
DSVKYTLVVDEHAQLELVSLRRASETTVTRVTLPPS

SEQ ID NO: 523 - protein, 156 aa, Homo sapiens; identical to SEQ ID NO: 458

SEQ ID NO: 524 - protein, 176 aa, Homo sapiens
KDSKEYGHTFRSDLREEILMLMARDKHPPELQVAFADCAADIKSAYESQPIRQTAQDWPATSLNCIAILFLRAGRTQEAWKMLGLFRKHNKIPRSELLNELMDSAKVSNSPSQAIEVVELASAFSLPICEGLTQRVMSDFAINQEQKEALSNLTALTSDSDTDSSSDSDSDTSEGK

SEQ ID NO: 525 - protein, 49 aa, Homo sapiens
MKAIGIEPSLATYHHIIRLFDQPGDPLKRSSFIIYDIMNELMGKRFSPK

SEQ ID NO: 526 - protein, 49 aa, Homo sapiens
DPDDDKFFQSAMSICSSLRDLELAYQVHGLLKTGDNWKFIGPDQHRNFY

SEQ ID NO: 527 - protein, 28 aa, Homo sapiens
YSKFFDLICLMEQIDVTLKWYEDLIPSA

SEQ ID NO: 528 - protein, 30 aa, Homo sapiens
YFPHSQTMIHLLQALDVANRLEVIPKIWER

SEQ ID NO: 529 - protein, 46 aa, Homo sapiens
KDSKEYGHTFRSDLREEILMLMARDKHPPELQVAFADCAADIKSAY

SEQ ID NO: 530 - protein, 50 aa, Homo sapiens
ESQPIRQTAQDWPATSLNCIAILFLRAGRTQEAWKMLGLFRKHNKIPRSE

SEQ ID NO: 531 - protein, 47 aa, Homo sapiens
LLNELMDSAKVSNSPSQAIEVVELASAFSLPICEGLTQRVMSDFAIN

SEQ ID NO: 532 - protein, 33 aa, Homo sapiens
QEQKEALSNLTALTSDSDTDSSSDSDSDTSEGK

SEQ ID NO: 533 - protein, 324 aa, Homo sapiens [sequence omitted]

SEQ ID NO: 534 - protein, 133 aa, Homo sapiens
IQDLQSRQKHEIESLYTKLGKVPPAVIIPPAAPLSGRRRRPTKSKGSKSSRSSSLGNKSPQLSGNLSGQSAASVLHPQQTLHPPGNIPESGQNQLLQPLKPSPSSDNLYSAFTSDGAISVPSLSAPGQGTSST

SEQ ID NO: 535 - protein, 53 aa, Homo sapiens
TSDGAISVPSLSAPGQGTSSTNTVGATVNSQAAQAQPPAMTSSRKGTFTDDLH

SEQ ID NO: 536 - protein, 48 aa, Homo sapiens
KGHMNYEGPGMARKFSAPGQLCISMTSNLGGSAPISAASATSLGHFTK

SEQ ID NO: 537 - protein, 31 aa, Homo sapiens
QPLKPSPSSDNLYSAFTSDGAISVPSLSAPG

SEQ ID NO: 538 - protein, 51 aa, Homo sapiens
MSSDNESDIEDEDLKLELRRLRDKHLKEIQDLQSRQKHEIESLYTKLGKVP

SEQ ID NO: 539 - protein, 47 aa, Homo sapiens
PAVIIPPAAPLSGRRRRPTKSKGSKSSRSSSLGNKSPQLSGNLSGQS

SEQ ID NO: 540 - protein, 50 aa, Homo sapiens
AASVLHPQQTLHPPGNIPESGQNQLLQPLKPSPSSDNLYSAFTSDGAISV

SEQ ID NO: 541 - protein, 44 aa, Homo sapiens
PSLSAPGQGTSSTNTVGATVNSQAAQAQPPAMTSSRKGTFTDDL

SEQ ID NO: 542 - protein, 46 aa, Homo sapiens
HKLVDNWARDAMNLSGRRGSKGHMNYEGPGMARKFSAPGQLCISMT

SEQ ID NO: 543 - protein, 46 aa, Homo sapiens
SNLGGSAPISAASATSLGHFTKSMCPPQQYGFPATPFGAQWSGTGG

SEQ ID NO: 544 - protein, 40 aa, Homo sapiens
PAPQPLGQFQPVGTASLQNFNISNLQKSISNPPGSNLRTT

SEQ ID NO: 545 - protein, 57 aa, Homo sapiens
  SITE (10): Xaa equals any of the naturally occurring L-amino acids
  SITE (17): Xaa equals any of the naturally occurring L-amino acids
VRVAAAESMXLLLECAXVRGPEYLTQMWHFMCDALIKAIGTEPDSDVLSEIMHSFAK

SEQ ID NO: 546 - protein, 85 aa, Homo sapiens [sequence omitted]

SEQ ID NO: 547 - protein, 100 aa, Homo sapiens
  SITE (8): Xaa equals any of the naturally occurring L-amino acids
  SITE (34): Xaa equals any of the naturally occurring L-amino acids
  SITE (38): Xaa equals any of the naturally occurring L-amino acids
GGREANKXFFIESCIALFVSFIINVFVVSVFAEXFFGXTNEQVVEVCTNTSSPHAGLFPKDNSTLAVDIYKGGVVLGCYFGPAALYIWAVGILAAGQSST

SEQ ID NO: 548 - protein, 45 aa, Homo sapiens
  SITE (8): Xaa equals any of the naturally occurring L-amino acids
  SITE (34): Xaa equals any of the naturally occurring L-amino acids
  SITE (38): Xaa equals any of the naturally occurring L-amino acids
GGREANKXFFIESCIALFVSFIINVFVVSVFAEXFFGXTNEQVVE

SEQ ID NO: 549 - protein, 55 aa, Homo sapiens
VCTNTSSPHAGLFPKDNSTLAVDIYKGGVVLGCYFGPAALYIWAVGILAAGQSST

SEQ ID NO: 550 - protein, 20 aa, Homo sapiens
QDKHAEEVRKNKELKEEASR

SEQ ID NO: 551 - protein, 92 aa, Homo sapiens
  SITE (16): Xaa equals any of the naturally occurring L-amino acids
  SITE (17): Xaa equals any of the naturally occurring L-amino acids
  SITE (20): Xaa equals any of the naturally occurring L-amino acids
  SITE (24): Xaa equals any of the naturally occurring L-amino acids
  SITE (36): Xaa equals any of the naturally occurring L-amino acids
  SITE (43): Xaa equals any of the naturally occurring L-amino acids
QQDLSPWAAPVGCPLXXASXTCHXLPLSGCLRRQSXSLPVVAXLCFWFSCPLASLFVPGQPCVTCPFPSLPFQDKHAEEVRKNKELKEEASR

SEQ ID NO: 552 - protein, 37 aa, Homo sapiens
  SITE (31): Xaa equals any of the naturally occurring L-amino acids
PTRCCTTQPCRSSARRPCWVPMVPSPEGREXQPTCPS

SEQ ID NO: 553 - protein, 363 aa, Homo sapiens
  SITE (68): Xaa equals any of the naturally occurring L-amino acids
  SITE (124): Xaa equals any of the naturally occurring L-amino acids
  SITE (211): Xaa equals any of the naturally occurring L-amino acids
MKRSLNENSARSTAGCLPVPLFNQKKRNRQPLTSNPLKDDSGISTPSDNYDFPPLPTDWAWEAVNPEXAPVMKTVDTGQIPHSVSRPLRSQDSVFNSIQSNTGRSQGGWSYRDGNKNTSLKTWXKNDFKPQCKRTNLVANDGKNSCPMSSGAQQQKQLRTPEPPNLSRNKETELLRQTHSSKISGCTMRGLDKNSALQTLKPNFQQNQYKXQMLDDIPEDNTLKETSLYQLQFKEKASSLRIISAVIESMKYWREHAQKTVLLFEVLAVLDSAVTPGPYYSKTFLMRDGKNTLPCVFYEIDRELPRLIRGRVHRCVGNYDQKKNIFQCVSVRPASVSEQKTFQAFVKIADVEMQYYINVMNET

SEQ ID NO: 554 - protein, 45 aa, Homo sapiens
  SITE (35): Xaa equals any of the naturally occurring L-amino acids
SQDSVFNSIQSNTGRSQGGWSYRDGNKNTSLKTWXKNDFKPQCKR

SEQ ID NO: 555 - protein, 36 aa, Homo sapiens
NKETELLRQTHSSKISGCTMRGLDKNSALQTLKPNF

SEQ ID NO: 556 - protein, 49 aa, Homo sapiens
SSLRIISAVIESMKYWREHAQKTVLLFEVLAVLDSAVTPGPYYSKTFLM

SEQ ID NO: 557 - protein, 42 aa, Homo sapiens
PRLIRGRVHRCVGNYDQKKNIFQCVSVRPASVSEQKTFQAFV

SEQ ID NO: 558 - protein, 370 aa, Homo sapiens
  SITE (320): Xaa equals any of the naturally occurring L-amino acids
  SITE (334): Xaa equals any of the naturally occurring L-amino acids
  SITE (337): Xaa equals any of the naturally occurring L-amino acids
  SITE (339): Xaa equals any of the naturally occurring L-amino acids
  SITE (341): Xaa equals any of the naturally occurring L-amino acids
  SITE (345): Xaa equals any of the naturally occurring L-amino acids
  SITE (350): Xaa equals any of the naturally occurring L-amino acids
  SITE (352): Xaa equals any of the naturally occurring L-amino acids
  SITE (355): Xaa equals any of the naturally occurring L-amino acids
  SITE (360): Xaa equals any of the naturally occurring L-amino acids
GVFRPCVCGRPASLTCSPLDPEVGPYCDTPTMRTLFNLLWLALACSPVHTTLSKSDAKKAASKTLLEKSQFSDKPVQDRGLVVTDLKAESVVLEHRSYCSAKARDRHFAGDVLGYVTPWNSHGYDVTKVFGSKFTQISPVWLQLKRRGREMFEVTGLHDVDQGWMRAVRKHAKGLHIVPRLLFEDWTYDDFRNVLDSEDEIEELSKTVVQVAKNQHFDGFVVEVWNQLLSQKRVGLIHMLTHLAEALHQARLLALLVIPPAITPGTDQLGMFTHKEFEQLAPVLDGFSLMTYDYSTAHQPGPNAPLSWVRACVQVLDPKXKWRTKSSWGSTSMXWTXRXPXDARXPVVGXRXIQXLKDHXPRMVLDSKPQ

SEQ ID NO: 559 - protein, 39 aa, Homo sapiens
TCSPLDPEVGPYCDTPTMRTLFNLLWLALACSPVHTTLS

SEQ ID NO: 560 - protein, 54 aa, Homo sapiens
LVVTDLKAESVVLEHRSYCSAKARDRHFAGDVLGYVTPWNSHGYDVTKVFGSKF

SEQ ID NO: 561 - protein, 52 aa, Homo sapiens
REMFEVTGLHDVDQGWMRAVRKHAKGLHIVPRLLFEDWTYDDFRNVLDSEDE

SEQ ID NO: 562 - protein, 56 aa, Homo sapiens
HFDGFVVEVWNQLLSQKRVGLIHMLTHLAEALHQARLLALLVIPPAITPGTDQLGM

SEQ ID NO: 563 - protein, 47 aa, Homo sapiens
  SITE (36): Xaa equals any of the naturally occurring L-amino acids
DGFSLMTYDYSTAHQPGPNAPLSWVRACVQVLDPKXKWRTKSSWGST

SEQ ID NO: 564 - protein, 152 aa, Homo sapiens
ERGVSINQFCKEFNERTKDIKEGIPLPTKILVKPDRTFEIKIGQPTVSYFLKAAAGIEKGARQTGKEVAGLVTLKHVYEIARIKAQDEAFALQDVPLSSVVRSIIGSARSLGIRVVKDLSSEELAAFQKERAIFLAAQKEADLAAQEEAAKK

SEQ ID NO: 565 - protein, 51 aa, Homo sapiens
ERGVSINQFCKEFNERTKDIKEGIPLPTKILVKPDRTFEIKIGQPTVSYFL

SEQ ID NO: 566 - protein, 49 aa, Homo sapiens
KAAAGIEKGARQTGKEVAGLVTLKHVYEIARIKAQDEAFALQDVPLSSV

SEQ ID NO: 567 - protein, 52 aa, Homo sapiens
VRSIIGSARSLGIRVVKDLSSEELAAFQKERAIFLAAQKEADLAAQEEAAKK

SEQ ID NO: 568 - protein, 270 aa, Homo sapiens
AVYTYHEKKKDTAASGYGTQNIRLSRDAVKDFDCCCLSLQPCHDPVVTPDGYLYEREAILEYILHQKKEIARQMKAYEKQRGTRREEQKELQRAASQDHVRGFLEKESAIVSRPLNPFTAKALSGTSPDDVQPGPSVGPPSKDKDKVLPSFWIPSLTPEAKATKLEKPSRTVTCPMSGKPLRMSDLTPVHFTPLDSSVDRVGLITRSERYVCAVTRDSLSNATPCAVLRPSGAVVTLECVEKLIRKDMVDPVTGDKLTDRDIIVLQRGGT

SEQ ID NO: 569 - protein, 54 aa, Homo sapiens
YLYEREAILEYILHQKKEIARQMKAYEKQRGTRREEQKELQRAASQDHVRGFLE

SEQ ID NO: 570 - protein, 64 aa, Homo sapiens
FTAKALSGTSPDDVQPGPSVGPPSKDKDKVLPSFWIPSLTPEAKATKLEKPSRTVTCPMSGKPL

SEQ ID NO: 571 - protein, 56 aa, Homo sapiens
VHFTPLDSSVDRVGLITRSERYVCAVTRDSLSNATPCAVLRPSGAVVTLECVEKLI

SEQ ID NO: 572 - protein, 66 aa, Homo sapiens
MSDLTPVHFTPLDSSVDRVGLITRSERYVCAVTRDSLSNATPCAVLRPSGAVVTLECVEKLIRKDM

SEQ ID NO: 573 - protein, 567 aa, Homo sapiens
  SITE (409): Xaa equals any of the naturally occurring L-amino acids
MDTSENRPENDVPEPPMPIADQVSNDDRPEGSVEDEEKKESSLPKSFKRKISVVSATKGVPAGNSDTEGGQPGRKRRWGASTATTQKKPSISITTESLKSLIPDIKPLAGQEAVVDLHADDSRISEDETERNGDDGTHDKGLKICRTVTQVVPAEGQENGQREEEEEEKEPEAEPPVPPQVSVEVALPPPAEHEVKKVTLGDTLTRRSISQQKSGVSITIDDPVRTAQVPSPPRGKISNIVHISNLVRPFTLGQLKELLGRTGTLVEEAFWIDKIKSHCFVTYSTVEEAVATRTALHGVKWPQSNPKFLCADYAEQDELDYHRGLLVDRPSETKTEEQGIPRPLHPPPPPPVQPPQHPRAEQREQERAVREQWAEREREMERRERTRSEREWDRDKVREGPRSRSRSRXRRRKERAKSKEKKSEKKEKAQEEPPAKLLDDLFRKTKAAPCIYWLPLTDSQIVQKEAERAERAKEREKRRKEQEEEEQKEREKEAERERNRQLEREKRREHSRERDRERERERERDRGDRDRDRERDRERGRERDRRDTKRHSRSRSRSTPVRDRGGR

SEQ ID NO: 574 - protein, 48 aa, Homo sapiens
ENDVPEPPMPIADQVSNDDRPEGSVEDEEKKESSLPKSFKRKISVVSA

SEQ ID NO: 575 - protein, 37 aa, Homo sapiens
VDLHADDSRISEDETERNGDDGTHDKGLKICRTVTQV

SEQ ID NO: 576 - protein, 55 aa, Homo sapiens
PQVSVEVALPPPAEHEVKKVTLGDTLTRRSISQQKSGVSITIDDPVRTAQVPSPP

SEQ ID NO: 577 - protein, 55 aa, Homo sapiens
LKELLGRTGTLVEEAFWIDKIKSHCFVTYSTVEEAVATRTALHGVKWPQSNPKFL

SEQ ID NO: 578 - protein, 53 aa, Homo sapiens
VDRPSETKTEEQGIPRPLHPPPPPPVQPPQHPRAEQREQERAVREQWAERERE

SEQ ID NO: 579 - protein, 59 aa, Homo sapiens
  SITE (19): Xaa equals any of the naturally occurring L-amino acids
EWDRDKVREGPRSRSRSRXRRRKERAKSKEKKSEKKEKAQEEPPAKLLDDLFRKTKAAP

SEQ ID NO: 580 - protein, 64 aa, Homo sapiens
PLTDSQIVQKEAERAERAKEREKRRKEQEEEEQKEREKEAERERNRQLEREKRREHSRERDRER

SEQ ID NO: 581 - protein, 32 aa, Homo sapiens
LDVPLASRSPEFPLPLMTQSELPRCPPHPGAR

SEQ ID NO: 582 - protein, 15 aa, Homo sapiens
LATLSISPIWSVLSL

SEQ ID NO: 583 - protein, 51 aa, Homo sapiens
GCDSCPPHLPREAFAQDTQAEGECSSRAERADMCPDAPPSQEVPEGPGAAP

SEQ ID NO: 584 - protein, 91 aa, Homo sapiens
RGWLPSSCLSCALRVCPDSSSTQAMGMLLAFWLPGASWQEAARGQYSEDEDTDTDEYKEAKASINPVTGRVEEKPPNPMEGMTEEQKEHEA

SEQ ID NO: 585 - protein, 27 aa, Homo sapiens
TQAMGMLLAFWLPGASWQEAARGQYSE

SEQ ID NO: 586 - protein, 50 aa, Homo sapiens
PQLPSCGRPWPGTASVFQSHTQGPREDPDPCRAQGSAGTHCPISLSPPRQ

SEQ ID NO: 587 - protein, 103 aa, Homo sapiens
  SITE (23): Xaa equals any of the naturally occurring L-amino acids
  SITE (35): Xaa equals any of the naturally occurring L-amino acids
KTHPRALWSAGPSCALCPGGSGXTSPPQGAPRGIXWDRCPQIQVLEGQRVRFPSQPQHPSHLAPRGGCGWRPDSRPLLPTPSGLSSFFPLDAQCWPWRTVSWR

SEQ ID NO: 588 - protein, 200 aa, Homo sapiens
  SITE (25): Xaa equals any of the naturally occurring L-amino acids
  SITE (40): Xaa equals any of the naturally occurring L-amino acids
  SITE (42): Xaa equals any of the naturally occurring L-amino acids
  SITE (174): Xaa equals any of the naturally occurring L-amino acids
  SITE (186): Xaa equals any of the naturally occurring L-amino acids
AGAPGQQARLQYLLSFQGEGAPHEXGATGEGGDGAWEACXCXRCLLNWQAGGWGLQLSLMWLHRGPLRPPGVRWTPWAFLEACSWGPALSLLGSGHSLPGTHEQAAWSRGCGQHGQSPTQKCKSSKEPLAQAPPWDSPAAPPHQGFADVLERPTLEPFGVLAPPVPSALVEAAXQVLLREPQGGFXGTAAHRSRCWKGSG

SEQ ID NO: 589 - protein, 145 aa, Homo sapiens
  SITE (44): Xaa equals any of the naturally occurring L-amino acids
  SITE (81): Xaa equals any of the naturally occurring L-amino acids
  SITE (125): Xaa equals any of the naturally occurring L-amino acids
  SITE (142): Xaa equals any of the naturally occurring L-amino acids
MQLLFLLPHPSPQLHASLPHSAALPCPRGESLTTASPAGAAGRXDAVPRCRHQAGRGWVPRGPCERGGGDRGKPRAVAWDXGSLRWAVWSARAGQGRSSEPAPLASRRGYSTCCLSRGKGLPMRXGRRGRGVMVPGKPACAXGAC

SEQ ID NO: 590 - protein, 34 aa, Homo sapiens
QHPSHLAPRGGCGWRPDSRPLLPTPSGLSSFFPL

SEQ ID NO: 591 - protein, 30 aa, Homo sapiens
GVRWTPWAFLEACSWGPALSLLGSGHSLPG

SEQ ID NO: 592 - protein, 28 aa, Homo sapiens
WDSPAAPPHQGFADVLERPTLEPFGVLA

SEQ ID NO: 593 - protein, 28 aa, Homo sapiens
RSSEPAPLASRRGYSTCCLSRGKGLPMR

SEQ ID NO: 594 - protein, 42 aa, Homo sapiens
PGFRGPSGSLGCSFFPRSLGRVLPPGCQRPGAHADSSPPPTP

SEQ ID NO: 595 - protein, 84 aa, Homo sapiens
EDLKKPDPASLRAASCGEGKKRKACKNCTCGLAEELEKEKSREQMSSQPKSACGNCYLGDAFRCASCPYLGMPAFKPGEKVLLS

SEQ ID NO: 596 - protein, 90 aa, Homo sapiens
EDLKKPDPASLRAASCGEGKKRKACKNCTCGLAEELEKEKSREQMSSQPKSACGNCYLGDAFRCASCPYLGMPAFKPGEKVLLSDSNLHD

SEQ ID NO: 597 - protein, 34 aa, Homo sapiens
CGNCYLGDAFRCASCPYLGMPAFKPGEKVLLSDS

SEQ ID NO: 598 - protein, 25 aa, Homo sapiens
SCGEGKKRKACKNCTCGLAEELEKE

SEQ ID NO: 599 - protein, 21 aa, Homo sapiens
SQPKSACGNCYLGDAFRCASC

SEQ ID NO: 600 - protein, 17 aa, Homo sapiens
REAGQNSERQYVSLSRD

SEQ ID NO: 601 - protein, 16 aa, Homo sapiens
CCCVSKDQGIMGPGFR

SEQ ID NO: 602 - protein, 103 aa, Homo sapiens
HSVTELQTPALSLISAMLPPSCLSELLVYSILCDTSQVAHNLLRAPEDSLTGCCDDIQCPSAPFHPQPHLTVALHLCPVVIYVNLQVLNLLHILTYLEILHVL

SEQ ID NO: 603 - protein, 24 aa, Homo sapiens
LLVYSILCDTSQVAHNLLRAPEDS

SEQ ID NO: 604 - protein, 26 aa, Homo sapiens
LTVALHLCPVVIYVNLQVLNLLHILT

SEQ ID NO: 605 - protein, 55 aa, Homo sapiens
FFNALYVFRKPQAIFDSEKENKRKNPTKYNNPLRYIYFKVKLIFQFIPLANYKIK

SEQ ID NO: 606 - protein, 90 aa, Homo sapiens
ESSGQARTLADPGPGWPRQQGMCFGSLTGLSTTPHGFLTVSAEADPRLIESLSQMLSMGFSDEGGWLTRLLQTKNYDIGAALDTIQYSKH

SEQ ID NO: 607 - protein, 100 aa, Homo sapiens
YSMVYIYHIFFIHSLLDGQLGWFHIFAIVSCAAPDIIFNSFAFSTYISKSCSFYLQNVSCIHSSLSIFNLFQCPIISCMEECNNWLTGLFLHFKIKRCDR

SEQ ID NO: 608 - protein, 67 aa, Homo sapiens
LSPSPRCCPWASLMKAAGSPGSCRPRTMTSERLWTPSSIQSIPRRCDHFCPPLLRAPLLSHSCVKLA

SEQ ID NO: 609 - protein, 34 aa, Homo sapiens
GWPRQQGMCFGSLTGLSTTPHGFLTVSAEADPRL

SEQ ID NO: 610 - protein, 33 aa, Homo sapiens
LGWFHIFAIVSCAAPDIIFNSFAFSTYISKSCS

SEQ ID NO: 611 - protein, 25 aa, Homo sapiens
SLSIFNLFQCPIISCMEECNNWLTG

SEQ ID NO: 612 - protein, 30 aa, Homo sapiens
LMKAAGSPGSCRPRTMTSERLWTPSSIQSI

SEQ ID NO: 613 - protein, 152 aa, Homo sapiens
  SITE (35): Xaa equals any of the naturally occurring L-amino acids
  SITE (71): Xaa equals any of the naturally occurring L-amino acids
SSSSPRRPRELLGSLKTPLVRPHSAPLDLPGSFCXHTADPMGALHTRFWGRQTWIHRKLRLHGTSRLASKXGIQFLRNPSKTHTPRDAAFRDPGQTPDPQSLQAPSPSKCSAPNRATSVWSLKPRLLYKHRPSSDKTPPPGRQAPLLFFSAG

SEQ ID NO: 614 - protein, 30 aa, Homo sapiens
FLRNPSKTHTPRDAAFRDPGQTPDPQSLQA

SEQ ID NO: 615 - protein, 159 aa, Homo sapiens
  SITE (43): Xaa equals any of the naturally occurring L-amino acids
  SITE (155): Xaa equals any of the naturally occurring L-amino acids
QEGSEPVLLEGECLVVCEPGRAAAGGPGGAALGEAPPGRVAFXAVRSHHHEPAGETGNGTSGAIYFDQVLVNEGGGFDRASGSFVAPVRGVYSFRFHVVKVYNRQTVQVSLMLNTWPVISAFANDPDVTREAATSSVLLPLDPGDRVSLRLRRGXSTGW

SEQ ID NO: 616 - protein, 35 aa, Homo sapiens
GETGNGTSGAIYFDQVLVNEGGGFDRASGSFVAPV

SEQ ID NO: 617 - protein, 25 aa, Homo sapiens
NDPDVTREAATSSVLLPLDPGDRVS

SEQ ID NO: 618 - protein, 11 aa, Homo sapiens
FHVVKVYNRQT

SEQ ID NO: 619 - protein, 9 aa, Homo sapiens
IYFDQVLVN

SEQ ID NO: 620 - protein, 25 aa, Homo sapiens
ESRERSGNRRGAEDRGTCGLQSPSA

SEQ ID NO: 621 - protein, 70 aa, Homo sapiens
  SITE (30): Xaa equals any of the naturally occurring L-amino acids
  SITE (31): Xaa equals any of the naturally occurring L-amino acids
  SITE (34): Xaa equals any of the naturally occurring L-amino acids
  SITE (37): Xaa equals any of the naturally occurring L-amino acids
EMPQFYFFLKLGCLAQVPMQRGGIGARGSXXPAXAVXGAREGRRKLSGAGFLCLKDLGPSEREDEEARET

SEQ ID NO: 622 - protein, 27 aa, Homo sapiens
MPQFYFFLKLGCLAQVPMQRGGIGARG

SEQ ID NO: 623 - protein, 185 aa, Homo sapiens
QATCSASGSPGQFGGCTPSPHGTGSCRHPGQGLRRSQRPGQSHRPRSPGPGRSRWPHWCHCRFPLLAHGGGFGPQQMPLAQGVPLPGLLPRAPLQQLGQAHRPPGTPPPAGRALTPPGPTRPPGPEAPEPRAARDCVGDLVASVAWLPTWLRGSATHKCPGLLPLFCFRSSPWILTAGTLIVCPL

SEQ ID NO: 624 - protein, 25 aa, Homo sapiens
GCTPSPHGTGSCRHPGQGLRRSQRP

SEQ ID NO: 625 - protein, 26 aa, Homo sapiens
SRWPHWCHCRFPLLAHGGGFGPQQMP

SEQ ID NO: 626 - protein, 28 aa, Homo sapiens
DCVGDLVASVAWLPTWLRGSATHKCPGL

SEQ ID NO: 627 - protein, 115 aa, Homo sapiens
  SITE (77): Xaa equals any of the naturally occurring L-amino acids
DDRPRVQHQAHLDSLAVVHLHHMEPEAVDTPDRGYEGARGPVKATALVHQDLVEVDGPTGAIAGFPCWLMVVASDRXKCHSPRGCLSQGCSPGPPCSSSARLTDHQALPLQQDGL

SEQ ID NO: 628 - protein, 31 aa, Homo sapiens
YEGARGPVKATALVHQDLVEVDGPTGAIAGF

SEQ ID NO: 629 - protein, 159 aa, Homo sapiens
  SITE (22): Xaa equals any of the naturally occurring L-amino acids
MAPLVPLPVSPAGSWWWLRTAXNATRPGGASPRAAPPGPPAAARPGSQTTRHSPSSRTGSDPSWAHPAPRARSTRTKGSPGLCRGPGSQCGLAPNMAEGLCNPQVPRSSAPLLFPLLSLDSHRRHPDSLPSLGSLNPLSIPVSQLCPASHSYSCCHCSS

SEQ ID NO: 630 - protein, 29 aa, Homo sapiens
SSRTGSDPSWAHPAPRARSTRTKGSPGLC

SEQ ID NO: 631 - protein, 27 aa, Homo sapiens
RRHPDSLPSLGSLNPLSIPVSQLCPAS

SEQ ID NO: 632 - protein, 31 aa, Homo sapiens
STHASGPPAPERLCLPERGTAPWGRRANDAA

SEQ ID NO: 633 - protein, 181 aa, Homo sapiens
  SITE (56): Xaa equals any of the naturally occurring L-amino acids
  SITE (57): Xaa equals any of the naturally occurring L-amino acids
  SITE (60): Xaa equals any of the naturally occurring L-amino acids
  SITE (83): Xaa equals any of the naturally occurring L-amino acids
  SITE (84): Xaa equals any of the naturally occurring L-amino acids
  SITE (165): Xaa equals any of the naturally occurring L-amino acids
VRRWWLRTMGAAAHCTPEQRRPRRPATILGMDTQNILHTRLSLCSLSWVSLASSFXXLAXRRKAIVVQQKQSKISKKKKVEKXXLNDSVNENSDTVGQIVHYIMKNEANADVLKAMVADNSLYDPESPVTPSTPGSPPVSPGLCHQGGRQGSTSVAIICIRWAVXSRGMCVIGVGTSGGTL

SEQ ID NO: 634 - protein, 29 aa, Homo sapiens
IMKNEANADVLKAMVADNSLYDPESPVTP

SEQ ID NO: 635 - protein, 143 aa, Homo sapiens
  SITE (77): Xaa equals any of the naturally occurring L-amino acids
HCHLWASGSCLACFFPGGLTRDAAQQHVTKSYSPPYLSQTSHSCLVFQPVLWPEYTFWNLFEAILQFQMNHSVLQQXGPRHVCRGAEEAAAGEGPGYSDRAAAARGAPSQWGRPAPKDTLAQTLGQTGRASPRLPAGLGTQAS

SEQ ID NO: 636 - protein, 28 aa, Homo sapiens
PAPKDTLAQTLGQTGRASPRLPAGLGTQ

SEQ ID NO: 637 - protein, 85 aa, Homo sapiens
  SITE (7): Xaa equals any of the naturally occurring L-amino acids
TIACFSXKARDMYAEERKRQQLERDQATVTEQLLREGLQASGDAQLRRTRLHKLSARREERVQGFLQALELKRADWLARLGTASA

SEQ ID NO: 638 - protein, 28 aa, Homo sapiens
LRRTRLHKLSARREERVQGFLQALELKR

SEQ ID NO: 639 - protein, 112 aa, Homo sapiens
  SITE (15): Xaa equals any of the naturally occurring L-amino acids
KMNSIPWQIPKITPXLDANLVIVECKPLWFCIGTIKQLKLWNQVFMGFKSMFFRIGKLNYLFTIPYCYLFIDNILGIFYSILGAQGIKYNFYIQRIFTCLLNLNLKIHSNLA

SEQ ID NO: 640 - protein, 27 aa, Homo sapiens
LWFCIGTIKQLKLWNQVFMGFKSMFFR

SEQ ID NO: 641 - protein, 26 aa, Homo sapiens
YSILGAQGIKYNFYIQRIFTCLLNLN

SEQ ID NO: 642 - protein, 9 aa, Homo sapiens
TFKLVRFLE

SEQ ID NO: 643 - protein, 32 aa, Homo sapiens
PRSRPALRPGRQRPPSHSATSGVLRPRKKPDP

SEQ ID NO: 644 - protein, 120 aa, Homo sapiens
  SITE (105): Xaa equals any of the naturally occurring L-amino acids
  SITE (115): Xaa equals any of the naturally occurring L-amino acids
RKSFAKPVLWTNAIQAGRGRVLCYTRPPPASSSFSALVPDGNRMEGLRTYFLNAFDPGTDYLYLFPFSFTVTFQHCLTVRWAFESLQVPQNRPERWASHPLPTHXPAYLPDNQVXMSASG

SEQ ID NO: 645 - protein, 25 aa, Homo sapiens
GNRMEGLRTYFLNAFDPGTDYLYLF

SEQ ID NO: 646 - protein, 30 aa, Homo sapiens
FQHCLTVRWAFESLQVPQNRPERWASHPLP

SEQ ID NO: 647 - protein, 31 aa, Homo sapiens
  SITE (8): Xaa equals any of the naturally occurring L-amino acids
  SITE (13): Xaa equals any of the naturally occurring L-amino acids
MTLITPSXKLTFXKGNKSWSSRACSSTLVDP

SEQ ID NO: 648 - protein, 14 aa, Homo sapiens
FLFLHAVDPWPSNG

SEQ ID NO: 649 - protein, 61 aa, Homo sapiens
WSCQSGVFLVFTGCSVLCQMLSGAVVVWRRSAPEDSAVWQASINKPRGKGRHGIKGENTSV

SEQ ID NO: 650 - protein, 35 aa, Homo sapiens
LVFTGCSVLCQMLSGAVVVWRRSAPEDSAVWQASI

SEQ ID NO: 651 - protein, 51 aa, Homo sapiens
GHPSPALSIAPSDGSQLPCDEVPYGEAHVTRYCKKPLTNSHLETEAQSSSL

SEQ ID NO: 652 - protein, 151 aa, Homo sapiens
  SITE (131): Xaa equals any of the naturally occurring L-amino acids
  SITE (145): Xaa equals any of the naturally occurring L-amino acids
NNKHYLSFCGSGFCPVYLGFTGLASHQAVKVLVVAVIIPRQDRERICLQAQVGRIHLRGCWTGPPFLDGYWSEAFYNTLSRGPLHRAPHHMATGFHQREQWKEQEKGDQGRHRSLLVASPQKRCYFCCILXVRSESLGPGVEFYXGVNGRR

SEQ ID NO: 653 - protein, 32 aa, Homo sapiens
ERICLQAQVGRIHLRGCWTGPPFLDGYWSEAF

SEQ ID NO: 654 - protein, 26 aa, Homo sapiens
SDGSQLPCDEVPYGEAHVTRYCKKPL

SEQ ID NO: 655 - protein, 27 aa, Homo sapiens
HQREQWKEQEKGDQGRHRSLLVASPQK

SEQ ID NO: 656 - DNA, 263 bp, Homo sapiens
gcttcgtgtccaaccctcttgcccttcgcctgtgtgcctggagccagtcccaccacgctcgcgtttcctcctgtagtgctcacaggtcccagcaccgatggcattccctttgccctgagtctgcagcgggtcccttttgtgcttccttcccctcaggtagcctctctccccctgggccactcccgggggtgagggggttaccccttcccagtgttttttattcctgtggggctcaccccaaagtattaaaagtagctttgtaa

SEQ ID NO: 657 - DNA, 263 bp, Homo sapiens; identical to SEQ ID NO: 656

SEQ ID NO: 658 - DNA, 263 bp, Homo sapiens; identical to SEQ ID NO: 656

SEQ ID NO: 659 - protein, 56 aa, Homo sapiens
  SITE (10): Xaa equals any of the naturally occurring L-amino acids
FRINRLTIGXAVAMTRGNQRELARQKNMKKQSDSVKGKRRDDGLSAAARKQRDSEI

SEQ ID NO: 660 - protein, 29 aa, Homo sapiens
AVAMTRGNQRELARQKNMKKQSDSVKGKR

SEQ ID NO: 661 - protein, 110 aa, Homo sapiens
KSRATRLRESAEMTGFLLPPASRGTRRSCSRSRKRQTRRRRNPSSFVASCPTLLPFACVPGASPTTLAFPPVVLTGPSTDGIPFALSLQRVPFVLPSPQVASLPLGHSRG

SEQ ID NO: 662 - protein, 26 aa, Homo sapiens
LRESAEMTGFLLPPASRGTRRSCSRS

SEQ ID NO: 663 - protein, 30 aa, Homo sapiens
VVLTGPSTDGIPFALSLQRVPFVLPSPQVA

SEQ ID NO: 664 - protein, 59 aa, Homo sapiens
LLSTSHLLTQSYSFNKRSHSFAWKNAHCILQSENNELQNSVYIYVCIYVHFICTFLCDI

SEQ ID NO: 665 - protein, 32 aa, Homo sapiens
KRSHSFAWKNAHCILQSENNELQNSVYIYVCI

SEQ ID NO: 666 - DNA, 160 bp, Homo sapiens
tggctcactgtcttacaatcactgctgtggaatcatgataccacttttagctctttgcatcttccttcagtgtatttttgtttttcaagaggaagtagattttaactggacaactttgagtactgacatcattgataaataaactggcttgtggtttcaa

SEQ ID NO: 667 - protein, 292 aa, Homo sapiens
  SITE (105): Xaa equals any of the naturally occurring L-amino acids
LDELMAHLTEMQAKVAVRADAGKKHLPDKQDHKASLDSMLGGLEQELQDLGIATVPKGHCASCQKPIAGKVIHALGQSWHPEHFVCTHCKEEIGSSPFFERSGLXYCPNDYHQLFSPRCAYCAAPILDKVLTAMNQTWHPEHFFCSHCGEVFGAEGFHEKDKKPYCRKDFLAMFSPKCGGCNRPVLENYLSAMDTVWHPECFVCGDCFTSFSTGSFFELDGRPFCELHYHHRRGTLCHGCGQPITGRCISAMGYKFHPEHFVCAFCLTQLSKGIFREQNDKTYCQPCFNKLF

SEQ ID NO: 668 - protein, 43 aa, Homo sapiens
KASLDSMLGGLEQELQDLGIATVPKGHCASCQKPIAGKVIHAL

SEQ ID NO: 669 - protein, 50 aa, Homo sapiens
CPNDYHQLFSPRCAYCAAPILDKVLTAMNQTWHPEHFFCSHCGEVFGAEG

SEQ ID NO: 670 - protein, 67 aa, Homo sapiens
DKKPYCRKDFLAMFSPKCGGCNRPVLENYLSAMDTVWHPECFVCGDCFTSFSTGSFFELDGRPFCEL

SEQ ID NO: 671 - protein, 46 aa, Homo sapiens
CGQPITGRCISAMGYKFHPEHFVCAFCLTQLSKGIFREQNDKTYCQ

SEQ ID NO: 672 - protein, 334 aa, Homo sapiens
  SITE (8): Xaa equals any of the naturally occurring L-amino acids
  SITE (145): Xaa equals any of the naturally occurring L-amino acids
HKSLAGAXVYTTNIQELNVYSEAQEPKESPPPSKTSAAAQLDELMAHLTEMQAKVAVRADAGKKHLPDKQDHKASLDSMLGGLEQELQDLGIATVPKGHCASCQKPIAGKVIHALGQSWHPEHFVCTHCKEEIGSSPFFERSGLXYCPNDYHQLFSPRCAYCAAPILDKVLTAMNQTWHPEHFFCSHCGEVFGAEGFHEKDKKPYCRKDFLAMFSPKCGGCNRPVLENYLSAMDTVWHPECFVCGDCFTSFSTGSFFELDGRPFCELHYHHRRGTLCHGCGQPITGRCISAMGYKFHPEHFVCAFCLTQLSKGIFREQNDKTYCQPCFNKLFPL

SEQ ID NO: 673 - protein, 22 aa, Homo sapiens
NVYSEAQEPKESPPPSKTSAAA

SEQ ID NO: 674 - protein, 26 aa, Homo sapiens
DSMLGGLEQELQDLGIATVPKGHCAS

SEQ ID NO: 675 - protein, 26 aa, Homo sapiens
YLSAMDTVWHPECFVCGDCFTSFSTG

SEQ ID NO: 676 - protein, 26 aa, Homo sapiens
RCISAMGYKFHPEHFVCAFCLTQLSK

SEQ ID NO: 677 - protein, 127 aa, Homo sapiens
  SITE (87): Xaa equals any of the naturally occurring L-amino acids
PTRPVLFFSTCQSCSSRPVRQEHLGCRTMEELDALLEELERSTLQDSDEYSNPAPLPLDQHSRKETNLDETSEILSIQDNTSPLPAXSCILPISRSSMSTVKPKSQRNHHHLLKRQQLLSWMSSWLT

SEQ ID NO: 678 - protein, 28 aa, Homo sapiens
PVRQEHLGCRTMEELDALLEELERSTLQ

SEQ ID NO: 679 - protein, 21 aa, Homo sapiens
SCILPISRSSMSTVKPKSQRN

SEQ ID NO: 680 - protein, 11 aa, Homo sapiens
WHPEHFVCTHC

SEQ ID NO: 681 - protein, 6 aa, Homo sapiens
LFSPRC

SEQ ID NO: 682 - protein, 6 aa, Homo sapiens
PILDKV

SEQ ID NO: 683 - protein, 8 aa, Homo sapiens
TWHPEHFF

SEQ ID NO: 684 - protein, 7 aa, Homo sapiens
EGFHEKD

SEQ ID NO: 685 - protein, 13 aa, Homo sapiens
KFHPEHFVCAFCL

SEQ ID NO: 686 - protein, 7 aa, Homo sapiens
PITGRCI

SEQ ID NO: 687 - protein, 7 aa, Homo sapiens
HPEHFVC

SEQ ID NO: 688 - protein, 31 aa, Homo sapiens
  SITE (12): Xaa equals any of the naturally occurring L-amino acids
RIYCSEDTFSPXAESGVSWQSSVSQLYQDYE

SEQ ID NO: 689 - protein, 452 aa, Homo sapiens
  SITE (61): Xaa equals any of the naturally occurring L-amino acids
MGSSQSVEIPGGGTEGYHVLRVQENSPGHRAGLEPFFDFIVSINGSRLNKDNDTLKDLLKXNVEKPVKMLIYSSKTLELRETSVTPSNLWGGQGLLGVSIRFCSFDGANENVWHVLEVESNSPAALAGLRPHSDYIIGADTVMNESEDLFSLIETHEAKPLKLYVYNTDTDNCREVIITPNSAWGGEGSLGCGIGYGYLHRIPTRPFEEGKKISLPGQMAGTPITPLKDGFTEVQLSSVNPPSLSPPGTTGIEQSLTGLSISSTPPAVSSVLSTGVPTVPLLPPQVNQSLTSVPPMNPATTLPGLMPLPAGLPNLPNLNLNLPAPHIMPGVGLPELVNPGLPPLPSMPPRNLPGIAPLPLPSEFLPSFPLVPESSSAASSGELLSSLPPTSNAPSDPATTTAKADAASSLTVDVTPPTAKAPTTVEDRVGDSTPVSEKPVSAAVDANASESP

SEQ ID NO: 690 - protein, 109 aa, Homo sapiens
  SITE (56): Xaa equals any of the naturally occurring L-amino acids
SVEIPGGGTEGYHVLRVQENSPGHRAGLEPFFDFIVSINGSRLNKDNDTLKDLLKXNVEKPVKMLIYSSKTLELRETSVTPSNLWGGQGLLGVSIRFCSFDGANENVWH

SEQ ID NO: 691 - protein, 145 aa, Homo sapiens
ESNSPAALAGLRPHSDYIIGADTVMNESEDLFSLIETHEAKPLKLYVYNTDTDNCREVIITPNSAWGGEGSLGCGIGYGYLHRIPTRPFEEGKKISLPGQMAGTPITPLKDGFTEVQLSSVNPPSLSPPGTTGIEQSLTGLSISS

SEQ ID NO: 692 - protein, 145 aa, Homo sapiens; identical to SEQ ID NO: 691

SEQ ID NO: 693 - protein, 151 aa, Homo sapiens
RIPTRPFEEGKKISLPGQMAGTPITPLKDGFTEVQLSSVNPPSLSPPGTTGIEQSLTGLSISSTPPAVSSVLSTGVPTVPLLPPQVNQSLTSVPPMNPATTLPGLMPLPAGLPNLPNLNLNLPAPHIMPGVGLPELVNPGLPPLPSMPPRN

SEQ ID NO: 694 - protein, 109 aa, Homo sapiens
PGLPPLPSMPPRNLPGIAPLPLPSEFLPSFPLVPESSSAASSGELLSSLPPTSNAPSDPATTTAKADAASSLTVDVTPPTAKAPTTVEDRVGDSTPVSEKPVSAAVDAN

SEQ ID NO: 695 - protein, 22 aa, Homo sapiens
AWGGEGSLGCGIGYGYLHRIPT

SEQ ID NO: 696 - protein, 10 aa, Homo sapiens
SPAALAGLRP

SEQ ID NO: 697 - protein, 8 aa, Homo sapiens
WGGQGLLG

SEQ ID NO: 698 - protein, 27 aa, Homo sapiens
RNGALLDKNFFNANSHFPVKGERIRRR

SEQ ID NO: 699 - protein, 97 aa, Homo sapiens
  SITE (83): Xaa equals any of the naturally occurring L-amino acids
RGSGFGWTSFPRPLPTELTCPGFHRERAFPPDGRVRGVRGWGIRRGCRAVWGVGACGCSPGSSWRGSAHRASGPADLPVACRXEGGADSPSLLPSPP

SEQ ID NO: 700 - protein, 23 aa, Homo sapiens
AVWGVGACGCSPGSSWRGSAHRA

SEQ ID NO: 701 - protein, 77 aa, Homo sapiens
YRPTMEKMKQVVTQTRWMRPDAKRANRRHRRISGKIFAWNPLPKTRFSRLLKAVSENTKRPEPSRPPWMVSHSVEAS

SEQ ID NO: 702 - protein, 27 aa, Homo sapiens
FAWNPLPKTRFSRLLKAVSENTKRPEP

SEQ ID NO: 703 - protein, 93 aa, Homo sapiens
  SITE (27): Xaa equals any of the naturally occurring L-amino acids
  SITE (28): Xaa equals any of the naturally occurring L-amino acids
  SITE (29): Xaa equals any of the naturally occurring L-amino acids
  SITE (30): Xaa equals any of the naturally occurring L-amino acids
  SITE (31): Xaa equals any of the naturally occurring L-amino acids
  SITE (32): Xaa equals any of the naturally occurring L-amino acids
  SITE (33): Xaa equals any of the naturally occurring L-amino acids
  SITE (34): Xaa equals any of the naturally occurring L-amino acids
  SITE (35): Xaa equals any of the naturally occurring L-amino acids
  SITE (36): Xaa equals any of the naturally occurring L-amino acids
  SITE (37): Xaa equals any of the naturally occurring L-amino acids
  SITE (38): Xaa equals any of the naturally occurring L-amino acids
IYKVFRHTAGLKPEVSCFENIRSCARXXXXXXXXXXXXWIFGVLHVVHASVVTAYLFTVSNAFQGMFIFLFLCVLSRKIQEEYYRLFKNVPCC

SEQ ID NO: 704 - protein, 55 aa, Homo sapiens
WIFGVLHVVHASVVTAYLFTVSNAFQGMFIFLFLCVLSRKIQEEYYRLFKNVPCC

SEQ ID NO: 705 - protein, 26 aa, Homo sapiens
IYKVFRHTAGLKPEVSCFENIRSCAR

SEQ ID NO: 706 - protein, 66 aa, Homo sapiens
IIYKVFRHTAGLKPEVSCFENIRSCARGALALLFLLGTTWIFGVLHVVHASVVTAYLFTVSNAFQG

SEQ ID NO: 707 - protein, 32 aa, Homo sapiens
EVSCFENIRSCARGALALLFLLGTTWIFGVLH

SEQ ID NO: 708 - protein, 86 aa, Homo sapiens
TTILRTCTIVCFYYWFNGVMVLLFFLDRNLLTFNQASIMPFSNTDFLHCLSFKKKLMLLRYIFYVVLTGPTLSLKGDENQIKNLFT

SEQ ID NO: 709 - protein, 23 aa, Homo sapiens
IVCFYYWFNGVMVLLFFLDRNLL

SEQ ID NO: 710 - protein, 24 aa, Homo sapiens
LLRYIFYVVLTGPTLSLKGDENQI

SEQ ID NO: 711 - protein, 50 aa, Homo sapiens
  SITE (29): Xaa equals any of the naturally occurring L-amino acids
ALTRIPPGDWVINVTAVSFAGKTTARFFXHSSPPSLGDQARTDPGHQRRD

SEQ ID NO: 712 - protein, 38 aa, Homo sapiens
SMLLLFPLQERPQQDSFIRLLLAWGTRLELTLDIKGGI

SEQ ID NO: 713 - protein, 130 aa, Homo sapiens
  SITE (76): Xaa equals any of the naturally occurring L-amino acids
  SITE (80): Xaa equals any of the naturally occurring L-amino acids
  SITE (90): Xaa equals any of the naturally occurring L-amino acids
  SITE (98): Xaa equals any of the naturally occurring L-amino acids
  SITE (113): Xaa equals any of the naturally occurring L-amino acids
TGLWADGFSSHIIPPLMSRVSSSLVPQARRRRMKESCCGLSCKGNSSNIDYPVTGRNSCERAPLCAFALHFQERTXITGXGEDPGPFQSXGRVTASRXTLACSHVAMTPAGCXQALGTPSSYCVRKAPRA

SEQ ID NO: 714 - protein, 28 aa, Homo sapiens
QARRRRMKESCCGLSCKGNSSNIDYPVT

SEQ ID NO: 715 - protein, 9 aa, Homo sapiens
LWRSSGVER

SEQ ID NO: 716 - protein, 27 aa, Homo sapiens
LQEVNITLPENSVWYERYKFDIPVFHL

SEQ ID NO: 717 - protein, 110 aa, Homo sapiens
MQGSGSQFRACLLCLCFSCPCSPGGPRWNSRQGGRRFPKTCRAISQNLVFKYKTFCPVRYMQPHRSSLCLHFTSYVFILSTWGSLRTYSTDLKKKKKNSRGGPVPIRPKS

SEQ ID NO: 718 - DNA, 99 bp, Homo sapiens
  SITE (24): n equals a,t,g, or c
tagcatgtagccagtcgaataacntataaggacaaagtggagtccacgcgtgcggccgtctagactagtggatcccccggctgcaggattcggcacgag

SEQ ID NO: 719 - protein, 51 aa, Homo sapiens
MQGSGSQFRACLLCLCFSCPCSPGGPRWNSRQGGRRFPKTCRAISQNLVFK

SEQ ID NO: 720 - protein, 54 aa, Homo sapiens
PVRYMQPHRSSLCLHFTSYVFILSTWGSLRTYSTDLKKKKKNSRGGPVPIRPKS

SEQ ID NO: 721 - protein, 38 aa, Homo sapiens [sequence omitted]

SEQ ID NO: 722 - protein, 39 aa, Homo sapiens
TSGSPGCRIRHELPGEEQRDCSLGWRGVGMRATHCQAAR

SEQ ID NO: 723 - protein, 128 aa, Homo sapiens [sequence omitted]

SEQ ID NO: 724 - protein, 31 aa, Homo sapiens
QFRACLLCLCFSCPCSPGGPRWNSRQGGRRF

SEQ ID NO: 725 - protein, 23 aa, Homo sapiens
NQFTSCILFCDGGHWRELLFQSI

SEQ ID NO: 726 - protein, 101 aa, Homo sapiens
AMSSKLLNLLALLQYSVHDHCHPRRLLKRGARATLRHKGWGPSSLRGCESFQIVLIGWGPDLAVGFGRGKLLSRSLPVRHGGVSEFCLPHRDVVRLEKVKK

SEQ ID NO: 727 - protein, 33 aa, Homo sapiens
GPSSLRGCESFQIVLIGWGPDLAVGFGRGKLLS

SEQ ID NO: 728 - protein, 32 aa, Homo sapiens
  SITE (8): Xaa equals any of the naturally occurring L-amino acids
TRKNIDFXETEKYYLFSFSNNVSFKNFWLKYN

SEQ ID NO: 729 - protein, 161 aa, Homo sapiens
  SITE (46): Xaa equals any of the naturally occurring L-amino acids
  SITE (50): Xaa equals any of the naturally occurring L-amino acids
MPRKTSKCRQLLCSGASRNADTAARQSTCSSHRPPGKIPSLGPRRXPGCXSVPSSRGEQSTGSPAAPRCGRRDAHRGLPGGAAMTPGDTWASFNPRAGHSKSQGEGQESSGASRQDRHPVSHWVERQREAWGAPRSSSAGGVKVAATTEREPEFKIKTGKA

SEQ ID NO: 730 - protein, 88 aa, Homo sapiens
  SITE (34): Xaa equals any of the naturally occurring L-amino acids
  SITE (38): Xaa equals any of the naturally occurring L-amino acids
CSGASRNADTAARQSTCSSHRPPGKIPSLGPRRXPGCXSVPSSRGEQSTGSPAAPRCGRRDAHRGLPGGAAMTPGDTWASFNPRAGHS

SEQ ID NO: 731 - protein, 59 aa, Homo sapiens
QGEGQESSGASRQDRHPVSHWVERQREAWGAPRSSSAGGVKVAATTEREPEFKIKTGKA

SEQ ID NO: 732 - protein, 63 aa, Homo sapiens [sequence omitted]

SEQ ID NO: 733 - protein, 176 aa, Homo sapiens
  SITE (127): Xaa equals any of the naturally occurring L-amino acids
TRAESLFPLLHAFPVFILNSGSLSVVAATFTPPALLLLGAPQASLCLSTQWLTGCLSCLDAPLLSCPSPWLLLCPALGLKLAHVSPGVMAAPPGRPLCASRLPHLGAAGEPVLCSPRLLGTELQPGXLRGPRLGILPGGRWEEQVLCLAAVSAFLDAPEHRSCRHFEVFLGMCQIT

SEQ ID NO: 734 - protein, 29 aa, Homo sapiens
PALGLKLAHVSPGVMAAPPGRPLCASRLP

SEQ ID NO: 735 - protein, 24 aa, Homo sapiens
GGRWEEQVLCLAAVSAFLDAPEHR

SEQ ID NO: 736 - protein, 98 aa, Homo sapiens
  SITE (48): Xaa equals any of the naturally occurring L-amino acids
SWPMCPPESWLLLLGGLCVRHVFHTWGQLASPCSVPLGCLAQSCSLGXSVDPDWGFCQGGDGRSRCFAWRLCLHFWTPQSTEVAGTLRSSSACARLHE

SEQ ID NO: 737 - protein, 29 aa, Homo sapiens
GDGRSRCFAWRLCLHFWTPQSTEVAGTLR

SEQ ID NO: 738 - protein, 235 aa, Homo sapiens; identical to SEQ ID NO: 318

SEQ ID NO: 739 - protein, 114 aa, Homo sapiens
MSPRYPGGPRPPLRIPNQALGGVPGSQPLLPSGMDPTRQQGHPNMGGPMQRMTPPRGMVPLGPQNYGGAMRPPLNALGGPGMPGMNMGPGGGRPWPNPTNANSIPYSSASPGNY

SEQ ID NO: 740 - protein, 81 aa, Homo sapiens
LNALGGPGMPGMNMGPGGGRPWPNPTNANSIPYSSASPGNYVGPPGGGGPPGTPIMPSPADSTNSGDNMYTLMNAVPPGPN

SEQ ID NO: 741 - protein, 70 aa, Homo sapiens
GPMGGLGGMESHHMNGSLGSGDMDSISKNSPNNMSLSNQPGTPRDDGEMGGNFLNPFQSESYSPSMTMSV

SEQ ID NO: 742 - protein, 14 aa, Homo sapiens
TCEHSSEAKAFHDY

SEQ ID NO: 743 - protein, 19 aa, Homo sapiens
RRETCEHSSEAKAFHDYPF

SEQ ID NO: 744 - protein, 20 aa, Homo sapiens
TITLFQSAWCFFSKYCTDFT

SEQ ID NO: 745 - protein, 105 aa, Homo sapiens
VRGCEDGGGGGIWGGWWPGQQMAPPWLSCPHRQFPHFHSGRQRRQSDLLKEELPQPSGAAGRASGNKPYTPPPASNSLTLRLLSFRFNAFNRSHPQPSLNYKDRQ

SEQ ID NO: 746 - protein, 25 aa, Homo sapiens
PWLSCPHRQFPHFHSGRQRRQSDLL

SEQ ID NO: 747 - protein, 20 aa, Homo sapiens
RLLSFRFNAFNRSHPQPSLN

SEQ ID NO: 748 - protein, 56 aa, Homo sapiens
RDSSLWAAALSFRQQCSSLASCLVSMYSRPGRQHRAKAGAGSQTEQCWGRKVDAVV

SEQ ID NO: 749 - protein, 27 aa, Homo sapiens
CLVSMYSRPGRQHRAKAGAGSQTEQCW

SEQ ID NO: 750 - protein, 86 aa, Homo sapiens
PEHGFSSCDFWEGAPSSGPKEGGRSPPQLACVWGMNLSSPPCLALLTNRACLAVNWHRVTLFPGIQVCNQNTGEEKLQDPCPHLSS

SEQ ID NO: 751 - protein, 30 aa, Homo sapiens
RSPPQLACVWGMNLSSPPCLALLTNRACLA

SEQ ID NO: 752 - protein, 74 aa, Homo sapiens
CERDSETSSIAMTCIKHKPPKQKKRLSLLPGFRSALPRVCRCHMITVQREAFRTHTGCSTSVHLPSRGGFLPDF

SEQ ID NO: 753 - protein, 28 aa, Homo sapiens
KKRLSLLPGFRSALPRVCRCHMITVQRE

SEQ ID NO: 754 - protein, 59 aa, Homo sapiens
QAFVLLSDLLLIFSPQMIVGGRDFLRPLVFFPEATLQSELASFLMDHVFIQPGDLGSGA

SEQ ID NO: 755 - protein, 43 aa, Homo sapiens
ACSYLLCNPEFTFFSRADFARSQLVDLLTDRFQQELEELLQVG

SEQ ID NO: 756 - protein, 35 aa, Homo sapiens
QKQLSSLRDRMVAFCELCQSCLSDVDTEIQEQVST

SEQ ID NO: 757 - protein, 27 aa, Homo sapiens
QVILPALTLVYFSILWTLTHISKSDAS

SEQ ID NO: 758 - protein, 31 aa, Homo sapiens
  SITE (26): Xaa equals any of the naturally occurring L-amino acids
STHDLTRWELYEPCCQLLQKAVDTGXVPHQV

SEQ ID NO: 759 - protein, 66 aa, Homo sapiens
TSFLFPLQAFVLLSDLLLIFSPQMIVGGRDFLRPLVFFPEATLQSELASFLMDHVFIQPGDLGSGA

SEQ ID NO: 760 - protein, 68 aa, Homo sapiens
GWGACSYLLCNPEFTFFSRADFARSQLVDLLTDRFQQELEELLQVGAGAGQWDTPNKGGRGCKTGDVD

SEQ ID NO: 761 - protein, 78 aa, Homo sapiens
VWVLDGIMGTEESVSSFFPFKPLCPQKQLSSLRDRMVAFCELCQSCLSDVDTEIQEQVSTDSSGSNKASIPAPIPRRN

SEQ ID NO: 762 - protein, 152 aa, Homo sapiens
  SITE (67): Xaa equals any of the naturally occurring L-amino acids
  SITE (86): Xaa equals any of the naturally occurring L-amino acids
NASLPSTSEWLSSSSPSRFYWCLWSWFPLFFSSITFPFLPQSTHDLTRWELYEPCCQLLQKAVDTGXVPHQVSGQARDGLGAGGLXFKDLRSRWPLGVSSLSAWSGQSEEDQVGGGHLLHSSLRRWTLLPGSSWISWKPRIILRDSRRRRVN

SEQ ID NO: 763 - protein, 38 aa, Homo sapiens
VLGEMLLWIFFPSQSSFLDEDEVYNLAATLKRLSAFYK

SEQ ID NO: 764 - protein, 44 aa, Homo sapiens
PKPHFSNPLLLQVILPALTLVYFSILWTLTHISKSDASPGECGS

SEQ ID NO: 765 - protein, 7 aa, Homo sapiens
HCQFLLG

SEQ ID NO: 766 - protein, 53 aa, Homo sapiens [sequence omitted]

SEQ ID NO: 767 - protein, 54 aa, Homo sapiens
  SITE (17): Xaa equals any of the naturally occurring L-amino acids
TKPGMVGHVPIVPATKXAEAGGSPEPGSSTLQWPMITPCTPSWATEPDHVSEDE

SEQ ID NO: 768 - protein, 30 aa, Homo sapiens
LLYHWETRAQPSLILYVVSDLRWMEFRTSC

SEQ ID NO: 769 - protein, 106 aa, Homo sapiens
  SITE (46): Xaa equals any of the naturally occurring L-amino acids
LAVSTSFICCADISTALPLGSSRPAPAPRHREHEHGHQARPPRLLXTSLMPLSTPAAAQLLWTQLTPMGGRPGGRHSPPTLHTGPRALPPGPPHPSLHVAALSLLR

SEQ ID NO: 770 - protein, 85 aa, Homo sapiens
  SITE (27): Xaa equals any of the naturally occurring L-amino acids
  SITE (38): Xaa equals any of the naturally occurring L-amino acids
APAVPHQPPGTESTSMGTKPGLPGCSXRPLCHYQHQLXPSYFGHSSPPWGAVLVGVTPHPRCTPAPGPCRLGLHTHPCTWQLCLC

SEQ ID NO: 771 - protein, 28 aa, Homo sapiens
CADISTALPLGSSRPAPAPRHREHEHGH

SEQ ID NO: 772 - protein, 25 aa, Homo sapiens
WTQLTPMGGRPGGRHSPPTLHTGPR

SEQ ID NO: 773 - protein, 20 aa, Homo sapiens
HQPPGTESTSMGTKPGLPGC

SEQ ID NO: 774 - protein, 64 aa, Homo sapiens
SRGSLLPPHLPHRVVVRVHRGAKSLKALRQYIGAAHLQLPWDGKDPARPLGITLCLQMEIQVLG

SEQ ID NO: 775 - protein, 150 aa, Homo sapiens [sequence omitted]

SEQ ID NO: 776 - protein, 25 aa, Homo sapiens
HRGAKSLKALRQYIGAAHLQLPWDG

SEQ ID NO: 777 - protein, 21 aa, Homo sapiens
PAPQARRWASNANGWGWDHQR

SEQ ID NO: 778 - protein, 23 aa, Homo sapiens
HPQYLNLHLQTQCYAQGSGWVLP

SEQ ID NO: 779 - protein, 64 aa, Homo sapiens [sequence omitted]

SEQ ID NO: 780 - protein, 123 aa, Homo sapiens
  SITE (45): Xaa equals any of the naturally occurring L-amino acids
  SITE (46): Xaa equals any of the naturally occurring L-amino acids
  SITE (47): Xaa equals any of the naturally occurring L-amino acids
YNFMFNFSKNCQKVFHSGCIIYIPTGNVQGFLFFHILALTNTSFXXXFCFFIIATLVDVKWHLIVLICISLMTNDIILFLCAYGSKVFPWRNVPSSPLPFQNLVICLLLFSFKKFWPGAVAHL

SEQ ID NO: 781 - protein, 91 aa, Homo sapiens
  SITE (34): Xaa equals any of the naturally occurring L-amino acids
  SITE (66): Xaa equals any of the naturally occurring L-amino acids
  SITE (79): Xaa equals any of the naturally occurring L-amino acids
CVTQARVQWRDLGSLQPPPPGFKRFSCLSLLSRXDYMHLPPRPANFCIFSKMGFHHVGQAGLEVLXSSDLPALASQSAXITGEPLRLARIS

SEQ ID NO: 782 - protein, 25 aa, Homo sapiens
LPPRPANFCIFSKMGFHHVGQAGLE

SEQ ID NO: 783 - protein, 24 aa, Homo sapiens
LILFSIMFLRFIQAVACISTSFLF

SEQ ID NO: 784 - protein, 90 aa, Homo sapiens
  SITE (90): Xaa equals any of the naturally occurring L-amino acids
ALVPSPQQILPSCFSLMWQVTTKSALVFFKCIYIPFLSAPSLPRLENCLIFCSLDVQSQLVFLSSPPVAGVLFFFLLSPLGSKSCSTVEX

SEQ ID NO: 785 - protein, 26 aa, Homo sapiens
APSLPRLENCLIFCSLDVQSQLVFLS

SEQ ID NO: 786 - protein, 13 aa, Homo sapiens
SSPSRVRLRHTPG

SEQ ID NO: 787 - protein, 76 aa, Homo sapiens
  SITE (43): Xaa equals any of the naturally occurring L-amino acids
  SITE (60): Xaa equals any of the naturally occurring L-amino acids
SNTNYCFMFFYFPVKVLVPFKNCYILSLLILPCCICGHQFPRXQACTFCLHTLGGFSFSXLFLVLLSFYVQTGFSV

SEQ ID NO: 788 - protein, 119 aa, Homo sapiens
  SITE (41): Xaa equals any of the naturally occurring L-amino acids
  SITE (97): Xaa equals any of the naturally occurring L-amino acids
  SITE (103): Xaa equals any of the naturally occurring L-amino acids
GTSRHGQRPIAPGTPWQREPRVEVMDPAGGPRGVLPRPCRXLVLLNPRGGKGKALQLFRSHVQPLLAEAEISFTLMLTERRNHARELVRSEELGRWXALVVMXGDGLMHEVVNGLHGAA

SEQ ID NO: 789 - protein, 24 aa, Homo sapiens
RPIAPGTPWQREPRVEVMDPAGGP

SEQ ID NO: 790 - protein, 15 aa, Homo sapiens
  SITE (8): Xaa equals any of the naturally occurring L-amino acids
ASGPLMGXAVLKIFE

SEQ ID NO: 791 - protein, 18 aa, Homo sapiens
  SITE (7): Xaa equals any of the naturally occurring L-amino acids
LLRSALXSPHLPTPVPLV

SEQ ID NO: 792 - protein, 69 aa, Homo sapiens
  SITE (2): Xaa equals any of the naturally occurring L-amino acids
  SITE (24): Xaa equals any of the naturally occurring L-amino acids
  SITE (45): Xaa equals any of the naturally occurring L-amino acids
  SITE (46): Xaa equals any of the naturally occurring L-amino acids
QXRNLAQEAFKWIPQDRPTVRSRXRMGLSIRLPILASNCCALPFXXPTSPLQCLWSCHCSFQANTGLAS

SEQ ID NO: 793 - protein, 59 aa, Homo sapiens
  SITE (53): Xaa equals any of the naturally occurring L-amino acids
QMTQEPPTSVRAHGIAAWGNGCRDKNTKRLIQYWPESCSGMTKGTGVGRWGEXRAERSS

SEQ ID NO: 794 - protein, 21 aa, Homo sapiens
HGIAAWGNGCRDKNTKRLIQY

SEQ ID NO: 795 - protein, 13 aa, Homo sapiens
CERSGYTRMAMDT

SEQ ID NO: 796 - protein, 132 aa, Homo sapiens [sequence omitted]

SEQ ID NO: 797 - protein, 29 aa, Homo sapiens
GSYSRGDWHMRVVGLRGLGASTLQGLLIG

SEQ ID NO: 798 - protein, 27 aa, Homo sapiens
STPAALLGCWPPFREGEILGLQRPGQW

SEQ ID NO: 799 - protein, 44 aa, Homo sapiens
TMGTWVDWLTTNTAHTPAIAAAICAEDFPQRHCGSVERSPDQAC

SEQ ID NO: 800 - protein, 23 aa, Homo sapiens
TNTAHTPAIAAAICAEDFPQRHC

SEQ ID NO: 801 - protein, 15 aa, Homo sapiens
MSPETKGKGRSFPLK

SEQ ID NO: 802 - protein, 82 aa, Homo sapiens [sequence omitted]

SEQ ID NO: 803 - protein, 63 aa, Homo sapiens [sequence omitted]

SEQ ID NO: 804 - protein, 25 aa, Homo sapiens
NKQARAMAFIFKGKDLPFPFVSGDI

SEQ ID NO: 805 - protein, 21 aa, Homo sapiens
YLGSWRSHLYCRLLPMDQVSP

SEQ ID NO: 806 - protein, 25 aa, Homo sapiens
GITIPVILSSGPSHLSTLSLAVSPR

SEQ ID NO: 807 - protein, 11 aa, Homo sapiens
LERLGVGRGLE

SEQ ID NO: 808 - protein, 67 aa, Homo sapiens
  SITE (48): Xaa equals any of the naturally occurring L-amino acids
  SITE (55): Xaa equals any of the naturally occurring L-amino acids
DLPPCWTTLKEHQCFMQYQLFTIQCKVVEQTICEDERKMESTCLTLAXPESVRQXCPATLWSSMNIC

SEQ ID NO: 809 - protein, 49 aa, Homo sapiens
  SITE (5): Xaa equals any of the naturally occurring L-amino acids
TNRVXLSWRKEEQRMGRTETGAKDKGRDFLERGSRGWQLYTGAADTEEV

SEQ ID NO: 810 - protein, 207 aa, Homo sapiens
EQVLALLWPRFELILEMNVQSVRSTDPQRLGGLDTRPHYITRRYAEFSSALVSINQTIPNERTMQLLGQLQVEVENFVLRVAAEFSSRKEQLVFLINNYDMMLGVLMERAADDSKEVESFQQLLNARTQEFIEELLSPPFGGLVAFVKEAEALIERGQAERLRGEEARVTQLIRGFGSSWKSSVESLSQDVMRSFTNFRNGTSIIQG

SEQ ID NO: 811 - protein, 110 aa, Homo sapiens
  SITE (72): Xaa equals any of the naturally occurring L-amino acids
ALLKYRFFYQFLLGNERATAKEIRDEYVETLSKIYLSYYRSYLGRLMKVQYEEVAEKDDLMGVEDTAKKGFXSKPSLRSRNTIFTLGTRGSVISPTELEAPILVPHTAQR

SEQ ID NO: 812 - protein, 97 aa, Homo sapiens
  SITE (16): Xaa equals any of the naturally occurring L-amino acids
  SITE (38): Xaa equals any of the naturally occurring L-amino acids
EQRYPFEALFRSQHYXLLDNSCREYLFICEFFVVSGPXAHDLFHAVMGRTLSMTLKHLDSYLADCYDAIAVFLCIHIVLRFRNIAAKRDVPALDRYW

SEQ ID NO: 813 - protein, 26 aa, Homo sapiens
GGLDTRPHYITRRYAEFSSALVSINQ

SEQ ID NO: 814 - protein, 20 aa, Homo sapiens
SRKEQLVFLINNYDMMLGVL

SEQ ID NO: 815 - protein, 411 aa, Homo sapiens
  SITE (72): Xaa equals any of the naturally occurring L-amino acids
  SITE (111): Xaa equals any of the naturally occurring L-amino acids
  SITE (127): Xaa equals any of the naturally occurring L-amino acids
  SITE (149): Xaa equals any of the naturally occurring L-amino acids
ALLKYRFFYQFLLGNERATAKEIRDEYVETLSKIYLSYYRSYLGRLMKVQYEEVAEKDDLMGVEDTAKKGFXSKPSLRSRNTIFTLGTRGSVISPTELEAPILVPHTAQRXEQRYPFEALFRSQHYXLLDNSCREYLFICEFFVVSGPXAHDLFHAVMGRTLSMTLKHLDSYLADCYDAIAVFLCIHIVLRFRNIAAKRDVPALDRYWEQVLALLWPRFELILEMNVQSVRSTDPQRLGGLDTRPHYITRRYAEFSSALVSINQTIPNERTMQLLGQLQVEVENFVLRVAAEFSSRKEQLVFLINNYDMMLGVLMERAADDSKEVESFQQLLNARTQEFIEELLSPPFGGLVAFVKEAEALIERGQAERLRGEEARVTQLIRGFGSSWKSSVESLSQDVMRSFTNFRNGTS

SEQ ID NO: 816 - protein, 82 aa, Homo sapiens
PADLRAVSGTSEVGLMLLELHHKVVNVDELSPGREGSELRLGQHPVEAMIELDQLGQRSLNDTGAISEVGETPHYILTQRFH

SEQ ID NO: 817 - protein, 120 aa, Homo sapiens
  SITE (12): Xaa equals any of the naturally occurring L-amino acids
  SITE (28): Xaa equals any of the naturally occurring L-amino acids
  SITE (50): Xaa equals any of the naturally occurring L-amino acids
GPHPGASHSAAXEQRYPFEALFRSQHYXLLDNSCREYLFICEFFVVSGPXAHDLFHAVMGRTLSMTLKHLDSYLADCYDAIAVFLCIHIVLRFRNIAAKRDVPALDRYWGTGACLAMATV

SEQ ID NO: 818 - protein, 303 aa, Homo sapiens
YEGKEFDYVFSIDVNEGGPSYKLPYNTSDDPWLTAYNFLQKNDLNPMFLDQVAKFIIDNTKGQMLGLGNPSFSDPFTGGGRYVPGSSGSSNTLPTADPFTGAGRYVPGSASMGTTMAGVDPFTGNSAYRSAASKTMNIYFPKKEAVTFDQANPTQILGKLKELNGTAPEEKKLTEDDLILLEKILSLICNSSSEKPTVQQLQILWKAINCPEDIVFPALDILRLSIKHPSVNENFCNEKEGAQFSSHLINLLNPKGKPANQLLALRTFCNCFVGQAGQKLMMSQRESLMSHAIELKSGSNKNI

SEQ ID NO: 819 - protein, 18 aa, Homo sapiens
HIALATLALNYSVCFHKD

SEQ ID NO: 820 - protein, 49 aa, Homo sapiens
HNIEGKAQCLSLISTILEVVQDLEATFRLLVALGTLISDDSNAVQLAKS

SEQ ID NO: 821 - protein, 30 aa, Homo sapiens
LGVDSQIKKYSSVSEPAKVSECCRFILNLL

SEQ ID NO: 822 - protein, 400 aa, Homo sapiens
YEGKEFDYVFSIDVNEGGPSYKLPYNTSDDPWLTAYNFLQKNDLNPMFLDQVAKFIIDNTKGQMLGLGNPSFSDPFTGGGRYVPGSSGSSNTLPTADPFTGAGRYVPGSASMGTTMAGVDPFTGNSAYRSAASKTMNIYFPKKEAVTFDQANPTQILGKLKELNGTAPEEKKLTEDDLILLEKILSLICNSSSEKPTVQQLQILWKAINCPEDIVFPALDILRLSIKHPSVNENFCNEKEGAQFSSHLINLLNPKGKPANQLLALRTFCNCFVGQAGQKLMMSQRESLMSHAIELKSGSNKNIHIALATLALNYSVCFHKDHNIEGKAQCLSLISTILEVVQDLEATFRLLVALGTLISDDSNAVQLAKSLGVDSQIKKYSSVSEPAKVSECCRFILNLL

SEQ ID NO: 823 - protein, 29 aa, Homo sapiens
LNLLLITQKVKCWDLGIPAFQIHLQVVVG

SEQ ID NO: 824 - protein, 29 aa, Homo sapiens
IKHPSVNENFCNEKEGAQFSSHLINLLNP

SEQ ID NO: 825 - protein, 22 aa, Homo sapiens
AIELKSGSNKNIHIALATLALN

SEQ ID NO: 826 - protein, 23 aa, Homo sapiens
VQLAKSLGVDSQIKKYSSVSEPA

SEQ ID NO: 827 - protein, 26 aa, Homo sapiens
YEGKEFDYVFSIDVNEGGPSYKLPYN

SEQ ID NO: 828 - protein, 26 aa, Homo sapiens
AYNFLQKNDLNPMFLDQVAKFIIDNT

SEQ ID NO: 829 - protein, 15 aa, Homo sapiens
SFSDPFTGGGRYVPG

SEQ ID NO: 830 - protein, 11 aa, Homo sapiens
TADPFTGAGRY

SEQ ID NO: 831 - protein, 19 aa, Homo sapiens
TTMAGVDPFTGNSAYRSAA

SEQ ID NO: 832 - protein, 9 aa, Homo sapiens
NIYFPKKEA

SEQ ID NO: 833 - protein, 19 aa, Homo sapiens
TFDQANPTQILGKLKELNG

SEQ ID NO: 834 - protein, 30 aa, Homo sapiens
PEDIVFPALDILRLSIKHPSVNENFCNEKE

SEQ ID NO: 835 - protein, 31 aa, Homo sapiens
QFSSHLINLLNPKGKPANQLLALRTFCNCFV

SEQ ID NO: 836 - protein, 26 aa, Homo sapiens
QAGQKLMMSQRESLMSHAIELKSGSN

SEQ ID NO: 837 - protein, 139 aa, Homo sapiens
YPNQDGDILRDQVLHEHIQRLSKVVTANHRALQIPEVYLREAPWPSAQSEIRTISAYKTPRDKVQCILRMCSTIMNLLSLANEDSVPGADDFVPVLVFVLIKANPPCLLSTVQYISSFYASCLSGEESYWWMQFTAAVE

SEQ ID NO: 838 - protein, 144 aa, Homo sapiens
YPNQDGDILRDQVLHEHIQRLSKVVTANHRALQIPEVYLREAPWPSAQSEIRTISAYKTPRDKVQCILRMCSTIMNLLSLANEDSVPGADDFVPVLVFVLIKANPPCLLSTVQYISSFYASCLSGEESYWWMQFTAAVEFIKTI

SEQ ID NO: 839 - protein, 14 aa, Homo sapiens
YPNQDGDILRDQVL

SEQ ID NO: 840 - protein, 11 aa, Homo sapiens
EAPWPSAQSEI

SEQ ID NO: 841 - protein, 21 aa, Homo sapiens
SGEESYWWMQFTAAVEFIKTI

SEQ ID NO: 842 - protein, 18 aa, Homo sapiens
ADDFVPVLVFVLIKANPP

SEQ ID NO: 843 - protein, 12 aa, Homo sapiens
YKTPRDKVQCIL

SEQ ID NO: 844 - protein, 15 aa, Homo sapiens
GADDFVPVLVFVLIK

SEQ ID NO: 845 - protein, 12 aa, Homo sapiens
PVLVFVLIKANP

SEQ ID NO: 846 - protein, 17 aa, Homo sapiens
SARASTQPPAGQHPGPC

SEQ ID NO: 847 - protein, 33 aa, Homo sapiens
MPGRWRWQRDMHPARKLLSLLFLILMGTELTQD

SEQ ID NO: 848 - protein, 19 aa, Homo sapiens
SAAPDSLLRSSKGSTRGSL

SEQ ID NO: 849 - protein, 20 aa, Homo sapiens
AAIVIWRGKSESRIAKTPGI

SEQ ID NO: 850 - protein, 17 aa, Homo sapiens
PLGITLPLGAPETGGGD

SEQ ID NO: 851 - protein, 20 aa, Homo sapiens
CAAETWKGSQRAGQLCALLA

SEQ ID NO: 852 - protein, 20 aa, Homo sapiens
FRGGGTLVLPPTHTPEWLIL

SEQ ID NO: 853 - protein, 28 aa, Homo sapiens [sequence omitted]

SEQ ID NO: 854 - protein, 80 aa, Homo sapiens
YIVQGTTSPFEMPTIPTPARHRAPHSPPAGHVATAPQALHIKPAMHTAGRHAGCPSRSQRHNPHRLFLEPPRAALCPKGG

SEQ ID NO: 855 - protein, 97 aa, Homo sapiens
ASNAHSWPARWLPFQVSAAQSPPPVSGAPKGSVMPKGRMSHSGVCVGGRTKVPPPLKMPGVLAIRLSLFPLQMTIAAKDPLVLPFELLSRESGAAES

SEQ ID NO: 856 - protein, 27 aa, Homo sapiens
GRMSHSGVCVGGRTKVPPPLKMPGVLA

SEQ ID NO: 857 - protein, 13 aa, Homo sapiens
GHQTAPETPSRSD

SEQ ID NO: 858 - protein, 5 aa, Homo sapiens
SQTDR

SEQ ID NO: 859 - protein, 22 aa, Homo sapiens
NIYFKEKRKRGGAKMAGAIIEN

SEQ ID NO: 860 - protein, 147 aa, Homo sapiens
VYLCAYTSTINVTVTTANAKLINMCCLVDSNTRSCVVIDEGIFRSAEQFLIKFRNKQSTIFPRFTWELHSIGLVFSIVFMGWCIQEHQSKDIQIPHPIDACEKGTVHLDCDAAPFPMAFRYLTNDEEDDSHGSAGQGDKHEELEPKN

SEQ ID NO: 861 - protein, 112 aa, Homo sapiens
KMPCRMSPNSSIQVQSNPMENHSTGILIKVMEIPRAKMTFSRSTGGRDIMVILLQYHTIMMKMLGVRKVFMANHTLVKPPFWWIPTNRISFISPIPTLIFFFSFTGSRMFKR

SEQ ID NO: 862 - protein, 74 aa, Homo sapiens [sequence omitted]

SEQ ID NO: 863 - protein, 31 aa, Homo sapiens
IKFRNKQSTIFPRFTWELHSIGLVFSIVFMG

SEQ ID NO: 864 - protein, 29 aa, Homo sapiens
SSIQVQSNPMENHSTGILIKVMEIPRAKM

SEQ ID NO: 865 - protein, 33 aa, Homo sapiens
LGVRKVFMANHTLVKPPFWWIPTNRISFISPIP

SEQ ID NO: 866 - protein, 9 aa, Homo sapiens
TMASMGLQV

SEQ ID NO: 867 - protein, 167 aa, Homo sapiens
KSWMMLWAVQDTGTITIRPANRNTTPATIMVLALALSSSRQLVHLPPTTDSSTPRAATMMLMMTRARAACRSCGSASSESYTLHCIWPVLCTTQFIHRPSQMVCEVTMLLPMKAVTRHMGSAQHSMTASQPRTASAMPITCSPMEAIVQRPRELRTWKAEGIRLWGP

SEQ ID NO: 868 - protein, 28 aa, Homo sapiens
LQVMGIALAVLGWLAVMLCCALPMWRVT

SEQ ID NO: 869 - protein, 22 aa, Homo sapiens
SNIVTSQTIWEGLWMNCVVQST

SEQ ID NO: 870 - protein, 18 aa, Homo sapiens
QMQCKVYDSLLALPQDLQ

SEQ ID NO: 871 - protein, 18 aa, Homo sapiens
KCTNCLEDESAKAKTMIV

SEQ ID NO: 872 - protein, 32 aa, Homo sapiens
GVVFLLAGLMVIVPVSWTAHNIIQDFYNPLVA

SEQ ID NO: 873 - protein, 12 aa, Homo sapiens
CCNCPPRTDKPY

SEQ ID NO: 874 - protein, 14 aa, Homo sapiens
PFTAIAGSEIFSLE

SEQ ID NO: 875 - protein, 11 aa, Homo sapiens
SKTEALTQAFR

SEQ ID NO: 876 - protein, 24 aa, Homo sapiens
VVHTVSLHEIDVINSRTQGFLALF

SEQ ID NO: 877 - protein, 15 aa, Homo sapiens
PGVLFIDEVHMLDIE

SEQ ID NO: 878 - protein, 280 aa, Homo sapiens
  SITE (197): Xaa equals any of the naturally occurring L-amino acids
AGIRQRFSARLWQLVSIMATVTATTKVPEIRDVTRIERIGAHSHIRGLGLDDALEPRQASQGMVGQLAARRAAGVVLEMIREGKIAGRAVLIAGQPGTGKTAIAMGMAQALGPDTPFTAIAGSEIFSLEMSKTEALTQAFRRSIGVRIKEETEIIEGEVVEIQIDRPATGTGSKVGKLTLKTTEMETIYDLGTKMIXSLTKDKVQAGDVITIDKATGKISKLGRSFTRARELRRYGLPDQVRAVPRWGAPETQGGGAHRVPARDRRHQLSHPGLPGALLR

SEQ ID NO: 879 - protein, 179 aa, Homo sapiens
  SITE (178): Xaa equals any of the naturally occurring L-amino acids
SPSTRRRARSPSWAAPSHAPANYDAMGSQTKFVQCPDGELQKRKEVVHTVSLHEIDVINSRTQGFLALFSGDTGEIKSEVREQINAKVAEWREEGKAEIIPGVLFIDEVHMLDIESFSFLNRALESDMAPVQQVYGDAVRALVAGAPDSRDATVGGLVPNSCSPGDPLVLERPPPRWXS

SEQ ID NO: 880 - protein, 89 aa, Homo sapiens
WIPRAAGIRHEATNRGITRIRGTSYQSPHGIPIDLLDRRHVTLQGPVEEGEALDVQHVDLVDEQHSRDDLRLALLAPLSHLGIDLLTDF

SEQ ID NO: 881 - protein, 30 aa, Homo sapiens
YDAMGSQTKFVQCPDGELQKRKEVVHTVSL

SEQ ID NO: 882 - protein, 31 aa, Homo sapiens
KAEIIPGVLFIDEVHMLDIESFSFLNRALES

SEQ ID NO: 883 - protein, 28 aa, Homo sapiens
EATNRGITRIRGTSYQSPHGIPIDLLDR

SEQ ID NO: 884 - protein, 22 aa, Homo sapiens
MRSARPSLGCLPSWAFSQALNI

SEQ ID NO: 885 - protein, 22 aa, Homo sapiens
LLGLKGLAPAEISAVCEKGNFN

SEQ ID NO: 886 - protein, 26 aa, Homo sapiens
VAHGLAWSYYIGYLRLILPELQARIR

SEQ ID NO: 887 - protein, 18 aa, Homo sapiens
TYNQHYNNLLRGAVSQRC

SEQ ID NO: 888 - protein, 43 aa, Homo sapiens
ILLPLDCGVPDNLSMADPNIRFLDKLPQQTGDRAGIKDRVYSN

SEQ ID NO: 889 - protein, 45 aa, Homo sapiens
SIYELLENGQRAGTCVLEYATPLQTLFAMSQYSQAGFSGEDRLEQ

SEQ ID NO: 890 - protein, 92 aa, Homo sapiens
AKLFCRTLEDILADAPESQNNCRLIAYQEPADDSSFSLSQEVLRHLRQEEKEEVTVGSLKTSAVPSTSTMSQEPELLISGMEKPLPLRTDFS

SEQ ID NO: 891 - protein, 43 aa, Homo sapiens
LLGLKGLAPAEISAVCEKGNFNVAHGLAWSYYIGYLRLILPEL

SEQ ID NO: 892 - protein, 76 aa, Homo sapiens
LRLHSEKLPLAARSAGPSLLVIIQSSQCPGGRRYRGSYWRTVRACLGCPLRRGALLLLSIYFYYSLPNAVGPPFTW

SEQ ID NO: 893 - protein, 133 aa, Homo sapiens [sequence omitted]

SEQ ID NO: 894 - protein, 87 aa, Homo sapiens
GVCQVSFMGPSRPTPHPSPLPLPGDAELSQWYQQAPSPSGSWSCSIIGEPQQKNGEEEEAEFGVLNPPAPTLQHQGCYGLSCRATLA

SEQ ID NO: 895 - protein, 22 aa, Homo sapiens
TMKLLKLRRNIVKLSLYRHFTN

SEQ ID NO: 896 - protein, 22 aa, Homo sapiens
TLILAVAASIVFIIWTTMKFRI

SEQ ID NO: 897 - protein, 28 aa, Homo sapiens
VTCQSDWRELWVDDAIWRLLFSMILFVI

SEQ ID NO: 898 - protein, 27 aa, Homo sapiens
MVLWRPSANNQRFAFSPLSEEEEEDEQ

SEQ ID NO: 899 - protein, 27 aa, Homo sapiens
MVLWRPSANNQRFAFSPLSEEEEEDEQ

SEQ ID NO: 900 - protein, 35 aa, Homo sapiens
KEPMLKESFEGMKMRSTKQEPNGNSKVNKAQEDDL

SEQ ID NO: 901 - protein, 37 aa, Homo sapiens
KWVEENVPSSVTDVALPALLDSDEERMITHFERSKME

SEQ ID NO: 902 - protein, 20 aa, Homo sapiens
DPRVRLNSLTCKHIFISLTQ

SEQ ID NO: 903 - protein, 11 aa, Homo sapiens
NAFGRHSTAVK

SEQ ID NO: 904 - protein, 283 aa, Homo sapiens
  SITE (16): Xaa equals any of the naturally occurring L-amino acids
  SITE (27): Xaa equals any of the naturally occurring L-amino acids
  SITE (65): Xaa equals any of the naturally occurring L-amino acids
ESCLLCGISEYPIQRXICPGCFDPCRXAFSSETLTGSNPGHHSQSGIWHRQATPGVTLHKVVVAXALYLLFSGMEGVLRVTGAQTDLASLAFIPLAFLDTALCWWIFISLTQTMKLLKLRRNIVKLSLYRHFTNTLILAVAASIVFIIWTTMKFRIVTCQSDWRELWVDDAIWRLLFSMILFVIMVLWRPSANNQRFAFSPLSEEEEEDEQKEPMLKESFEGMKMRSTKQEPNGNSKVNKAQEDDLKWVEENVPSSVTDVALPALLDSDEERMITHFERSKME

SEQ ID NO: 905 - protein, 13 aa, Homo sapiens
  SITE (7): Xaa equals any of the naturally occurring L-amino acids
YEPMDFXMALIYD

SEQ ID NO: 906 - protein, 16 aa, Homo sapiens
IRHELTVLRDTRPACA

SEQ ID NO: 907 - protein, 10 aa, Homo sapiens
  SITE (4): Xaa equals any of the naturally occurring L-amino acids
MDFXMALIYD

SEQ ID NO: 908 - protein, 24 aa, Homo sapiens
MQEMMRNQDRALSNLESIPGGYNA

SEQ ID NO: 909 - protein, 25 aa, Homo sapiens
LRRMYTDIQEPMLSAAQEQFGGNPF

SEQ ID NO: 910 - protein, 32 aa, Homo sapiens
ASLVSNTSSGEGSQPSRTENRDPLPNPWAPQT

SEQ ID NO: 911 - protein, 71 aa, Homo sapiens
SQSSSASSGTASTVGGTTGSTASGTSGQSTTAPNLVPGVGASMFNTPGMQSLLQQITENPQLMQNMLSAPY

SEQ ID NO: 912 - protein, 45 aa, Homo sapiens
MRSMMQSLSQNPDLAAQMMLNNPLFAGNPQLQEQMRQQLPTFLQQ

SEQ ID NO: 913 - protein, 73 aa, Homo sapiens
MQNPDTLSAMSNPRAMQALLQIQQGLQTLATEAPGLIPGFTPGLGALGSTGGSSGTNGSNATPSENTSPTAGT

SEQ ID NO: 914 - protein, 72 aa, Homo sapiens
TEPGHQQFIQQMLQALAGVNPQLQNPEVRFQQQLEQLSAMGFLNREANLQALIATGGDINAAIERLLGSQPS

SEQ ID NO: 915 - protein, 45 aa, Homo sapiens
RNPAMMQEMMRNQDRALSNLESIPGGYNALRRMYTDIQEPMLSAA

SEQ ID NO: 916 - protein, 13 aa, Homo sapiens
GNPFASLVSNTSS

SEQ ID NO: 917 - protein, 11 aa, Homo sapiens
ENRDPLPNPWA

SEQ ID NO: 918 - protein, 17 aa, Homo sapiens
GKILKDQDTLSQHGIHD

SEQ ID NO: 919 - protein, 14 aa, Homo sapiens
GLTVHLVIKTQNRP

SEQ ID NO: 920 - protein, 18 aa, Homo sapiens
SELQSQMQRQLLSNPEMM

SEQ ID NO: 921 - protein, 14 aa, Homo sapiens
PEISHMLNNPDIMR

SEQ ID NO: 922 - protein, 18 aa, Homo sapiens
RQLIMANPQMQQLIQRNP

SEQ ID NO: 923 - protein, 27 aa, Homo sapiens
NLCHVDCQDLLNPNLLAGIHCAKRIVS

SEQ ID NO: 924 - protein, 23 aa, Homo sapiens
LDGFEGYSLSDWLCLAFVESKFN

SEQ ID NO: 925 - protein, 22 aa, Homo sapiens
NENADGSFDYGLFQINSHYWCN

SEQ ID NO: 926 - protein, 27 aa, Homo sapiens
NLCHVDCQDLLNPNLLAGIHCAKRIVS

SEQ ID NO: 927 - protein, 13 aa, Homo sapiens
EPSALSCTSSPPR

SEQ ID NO: 928 - protein, 13 aa, Homo sapiens
IREVNEVIQNPAT

SEQ ID NO: 929 - protein, 30 aa, Homo sapiens
ITRILLSHFNWDKEKLMERYFDGNLEKLFA

SEQ ID NO: 930 - protein, 23 aa, Homo sapiens
NTRSSAQDMPCQICYLNYPNSYF

SEQ ID NO: 931 - protein, 60 aa, Homo sapiens
CDILVDDNTVMRLITDSKVKLKYQHLITNSFVECNRLLKWCPAPDCHHVVKVQYPDAKPV

SEQ ID NO: 932 - protein, 52 aa, Homo sapiens
CDILVDDNTVMRLITDSKVKLKYQHLITNSFVECNRLLKWCPAPDCHHVVKV

SEQ ID NO: 933 - protein, 60 aa, Homo sapiens
GCNHMVCRNQNCKAEFCWVCLGPWEPHGSAWYNCNRYNEDDAKAARDAQERSRAALQRYL

SEQ ID NO: 934 - protein, 60 aa, Homo sapiens
FYCNRYMNHMQSLRFEHKLYAQVKQKMEEMQQHNMSWIEVQFLKKAVDVLCQCRATLMYT

SEQ ID NO: 935 - protein, 60 aa, Homo sapiens
YVFAFYLKKNNQSIIFENNQADLENATEVLSGYLERDISQDSLQDIKQKVQDKYRYCESR

SEQ ID NO: 936 - protein, 37 aa, Homo sapiens
TGLECGHKFCMQCWSEYLTTKIMEEGMGQTISCPAHG

SEQ ID NO: 937 - protein, 21 aa, Homo sapiens
MWGYLFVDAAWNFLGCLICGW

SEQ ID NO: 938 - protein, 46 aa, Homo sapiens
  SITE (21): Xaa equals any of the naturally occurring L-amino acids
MHFISSGNVSAIRSSILLLRXSLSYLGNCLRVSAIFVYFLLFLLLS

SEQ ID NO: 939 - protein, 80 aa, Homo sapiens [sequence omitted]

SEQ ID NO: 940 - protein, 131 aa, Homo sapiens
  SITE (124): Xaa equals any of the naturally occurring L-amino acids
MLPALASCCHFSPPEQAARLKKLQEQEKQQKVEFRKRMEKEVSDFIQDSGQIKKKFQPMNKIERSILHDVVEVAGLTSFSFGEDDDCRYVMIFKKEFAPSDEELDSYRRGEEWDPQKAEEKRNXKELAQRQ

SEQ ID NO: 941 - protein, 76 aa, Homo sapiens
  SITE (47): Xaa equals any of the naturally occurring L-amino acids
EEEAAQQGPVVVSPASDYKDKYSHLIGKGAAKDAAHMLQANKTYGCXPVANKRDTRSIEEAMNEIRAKKRLRQSGE

SEQ ID NO: 942 - protein, 40 aa, Homo sapiens
PPRRPAQLPLTPGAGQGAGRDKAAAIRAHPGAPPLNHLLP

SEQ ID NO: 943 - protein, 28 aa, Homo sapiens
AVPQAGGKQVFDLSPLELGYVRGMCVCV

SEQ ID NO: 944 - protein, 207 aa, Homo sapiens
  SITE (124): Xaa equals any of the naturally occurring L-amino acids
  SITE (178): Xaa equals any of the naturally occurring L-amino acids
MLPALASCCHFSPPEQAARLKKLQEQEKQQKVEFRKRMEKEVSDFIQDSGQIKKKFQPMNKIERSILHDVVEVAGLTSFSFGEDDDCRYVMIFKKEFAPSDEELDSYRRGEEWDPQKAEEKRNXKELAQRQEEEAAQQGPVVVSPASDYKDKYSHLIGKGAAKDAAHMLQANKTYGCXPVANKRDTRSIEEAMNEIRAKKRLRQSGE

SEQ ID NO: 945 - protein, 34 aa, Homo sapiens
  SITE (10): Xaa equals any of the naturally occurring L-amino acids
LLCPVLNSGXSWNFPHPSQPEYSFHGFHSTRLWI

SEQ ID NO: 946 - protein, 28 aa, Homo sapiens
PSTPWFLFLLGLTCPFSTSHPRWDSIPP

SEQ ID NO: 947 - protein, 227 aa, Homo sapiens
ELSISISNVALADEGEYTCSIFTMPVRTAKSLVTVLGIPQKPIITGYKSSLREKDTATLNCQSSGSKPAARLTWRKGDQELHGEPTRIQEDPNGKTFTVSSSVTFQVTREDDGASIVCSVNHESLKGADRSTSQRIEVLYTPTAMIRPDPPHPREGQKLLLHCEGRGNPVPQQYLWEKEGSVPPLKMTQESALIFPFLNKSDSGTYGCTATSNMGSYKAYYTLNVND

SEQ ID NO: 948 - protein, 64 aa, Homo sapiens
ELSISISNVALADEGEYTCSIFTMPVRTAKSLVTVLGIPQKPIITGYKSSLREKDTATLNCQSS

SEQ ID NO: 949 - protein, 65 aa, Homo sapiens
CQSSGSKPAARLTWRKGDQELHGEPTRIQEDPNGKTFTVSSSVTFQVTREDDGASIVCSVNHESL

SEQ ID NO: 950 - protein, 58 aa, Homo sapiens
HESLKGADRSTSQRIEVLYTPTAMIRPDPPHPREGQKLLLHCEGRGNPVPQQYLWEKE

SEQ ID NO: 951 - protein, 52 aa, Homo sapiens
WEKEGSVPPLKMTQESALIFPFLNKSDSGTYGCTATSNMGSYKAYYTLNVND

SEQ ID NO: 952 - protein, 36 aa, Homo sapiens
PSPVPSSSSTYHAIIGGIVAFIVFLLLIMLIFLGHY

SEQ ID NO: 953 - protein, 44 aa, Homo sapiens
LIRHKGTYLTHEAKGSDDAPDADTAIINAEGGQSGGDDKKEYFI

SEQ ID NO: 954 - protein, 123 aa, Homo sapiens
VPELPDRVHQLHQAVQGCALGRPGFPGGPTHSGHHKSHPGPAGGDYNRCDRPGQVHLHNPRGTGRRGQLHPTAGPGVHRRACPSQQLPHRLGPGVPCPSPSLTPVLPSWTQSWCGLPGYTSSS

SEQ ID NO: 955 - protein, 22 aa, Homo sapiens
VHQLHQAVQGCALGRPGFPGGP

SEQ ID NO: 956 - protein, 42 aa, Homo sapiens
PTHSGHHKSHPGPAGGDYNRCDRPGQVHLHNPRGTGRRGQLH

SEQ ID NO: 957 - protein, 55 aa, Homo sapiens
LHPTAGPGVHRRACPSQQLPHRLGPGVPCPSPSLTPVLPSWTQSWCGLPGYTSSS

SEQ ID NO: 958 - protein, 276 aa, Homo sapiens
  SITE (10): Xaa equals any of the naturally occurring L-amino acids
SLRRPRSAAXQTLTTFLSSVSSASSSALPGSREPCDPRAPPPPRSGSAASCCSCCCSCPRRRAPLRSPRGSKRRIRQREVVDLYNGMCLQGPAGVPGRDGSPGANGIPGTPGIPGRDGFKGEKGECLRESFEESWTPNYKQCSWSSLNYGIDLGKIAECTFTKMRSNSALRVLFSGSLRLKCRNACCQRWYFTFNGAECSGPLPIEAIIYLDQGSPEMNSTINIHRTSSVEGLCEGIGAGLVDVAIWVGTCSDYPKGDASTGWNSVSRIIIEELPK

SEQ ID NO: 959 - protein, 61 aa, Homo sapiens
  SITE (10): Xaa equals any of the naturally occurring L-amino acids
SLRRPRSAAXQTLTTFLSSVSSASSSALPGSREPCDPRAPPPPRSGSAASCCSCCCSCPRR

SEQ ID NO: 960 - protein, 52 aa, Homo sapiens
RAPLRSPRGSKRRIRQREVVDLYNGMCLQGPAGVPGRDGSPGANGIPGTPGI

SEQ ID NO: 961 - protein, 52 aa, Homo sapiens
TPGIPGRDGFKGEKGECLRESFEESWTPNYKQCSWSSLNYGIDLGKIAECTF

SEQ ID NO: 962 - protein, 66 aa, Homo sapiens
FTKMRSNSALRVLFSGSLRLKCRNACCQRWYFTFNGAECSGPLPIEAIIYLDQGSPEMNSTINIHR

SEQ ID NO: 963 - protein, 51 aa, Homo sapiens
RTSSVEGLCEGIGAGLVDVAIWVGTCSDYPKGDASTGWNSVSRIIIEELPK

SEQ ID NO: 964 - protein, 26 aa, Homo sapiens
TKKENCRPASLMNIDTKILNKILMNQ

SEQ ID NO: 965 - protein, 214 aa, Homo sapiens
  SITE (25): Xaa equals any of the naturally occurring L-amino acids
  SITE (26): Xaa equals any of the naturally occurring L-amino acids
  SITE (90): Xaa equals any of the naturally occurring L-amino acids
  SITE (94): Xaa equals any of the naturally occurring L-amino acids
  SITE (105): Xaa equals any of the naturally occurring L-amino acids
  SITE (120): Xaa equals any of the naturally occurring L-amino acids
MCNLPIKVVCRANAEYMSPSGKVPXXHVGNQVVSELGPIVQFVKAKGHSLSDGLEEVQKAEMKAYMELVNNMLLTAELYLQWCDEATVGXITHXRYGSPYPWPLXHILAYQKQWEVKRKXKAIGWGKKTLDQVLEDVDQCCQALSQRLGTQPYFFNKQPTELDALVFGHLYTILTTQLTNDELSEKVKNYSNLLAFCRRIEQHYFEDRGKGRLS

SEQ ID NO: 966 - protein, 44 aa, Homo sapiens
  SITE (25): Xaa equals any of the naturally occurring L-amino acids
  SITE (26): Xaa equals any of the naturally occurring L-amino acids
MCNLPIKVVCRANAEYMSPSGKVPXXHVGNQVVSELGPIVQFVK

SEQ ID NO: 967 - protein, 44 aa, Homo sapiens
FVKAKGHSLSDGLEEVQKAEMKAYMELVNNMLLTAELYLQWCDE

SEQ ID NO: 968 - protein, 51 aa, Homo sapiens
  SITE (11): Xaa equals any of the naturally occurring L-amino acids
  SITE (15): Xaa equals any of the naturally occurring L-amino acids
  SITE (26): Xaa equals any of the naturally occurring L-amino acids
  SITE (41): Xaa equals any of the naturally occurring L-amino acids
LQWCDEATVGXITHXRYGSPYPWPLXHILAYQKQWEVKRKXKAIGWGKKTL

SEQ ID NO: 969 - protein, 43 aa, Homo sapiens
DQVLEDVDQCCQALSQRLGTQPYFFNKQPTELDALVFGHLYTI

SEQ ID NO: 970 - protein, 41 aa, Homo sapiens
LTTQLTNDELSEKVKNYSNLLAFCRRIEQHYFEDRGKGRLS

SEQ ID NO: 971 - protein, 70 aa, Homo sapiens
  SITE (2): Xaa equals any of the naturally occurring L-amino acids
  SITE (3): Xaa equals any of the naturally occurring L-amino acids
  SITE (4): Xaa equals any of the naturally occurring L-amino acids
MXXXNSHITIFTLNVNGLNAPNERHRLANWIQSQDQVCCIQETHLTGRDTHRLKIKGWRKIYQANGKQKK

SEQ ID NO: 972 - protein, 28 aa, Homo sapiens
FTLNVNGLNAPNERHRLANWIQSQDQVC

SEQ ID NO: 973 - protein, 17 aa, Homo sapiens
THLTGRDTHRLKIKGWR

SEQ ID NO: 974 - protein, 14 aa, Homo sapiens
GWRKIYQANGKQKK

SEQ ID NO: 975 - protein, 54 aa, Homo sapiens
  SITE (37): Xaa equals any of the naturally occurring L-amino acids
IYHLHSWIFFHFKRAFCMCFITMKVIHAHCSKLRKCXNAQISVFCTTLTASYPT

SEQ ID NO: 976 - protein, 23 aa, Homo sapiens
IYHLHSWIFFHFKRAFCMCFITM

SEQ ID NO: 977 - protein, 31 aa, Homo sapiens
  SITE (14): Xaa equals any of the naturally occurring L-amino acids
KVIHAHCSKLRKCXNAQISVFCTTLTASYPT

SEQ ID NO: 978 - protein, 58 aa, Homo sapiens
  SITE (29): Xaa equals any of the naturally occurring L-amino acids
WNLLWYFQRLRLPSILPGLVLASCDGPSXSQAPSPWLTPDPASVQVRLLWDVLTPDPN

SEQ ID NO: 979 - protein, 54 aa, Homo sapiens
QRGIYREILFLTMAALGKDHVDIVAFDKKYKSAFNKLASSMGKEELRHRRAQMP

SEQ ID NO: 980 - protein, 23 aa, Homo sapiens
WNLLWYFQRLRLPSILPGLVLAS

SEQ ID NO: 981 - protein, 191 aa, Homo sapiens
EDDGFNRSIHEVILKNITWYSERVLTEISLGSLLILVVIRTIQYNMTRTRDKYLHTNCLAALANMSAQFRSLHQYAAQRIISLFSLLSKKHNKVLEQATQSLRGSLSSNDVPLPDYAQDLNVIEEVIRMMLEIINSCLTNSLHHNPNLVYALLYKRDLFEQFRTHPSFQDIMQNIDLVISFFSSRLLQAGS

SEQ ID NO: 982 - protein, 38 aa, Homo sapiens
EDDGFNRSIHEVILKNITWYSERVLTEISLGSLLILVV

SEQ ID NO: 983 - protein, 53 aa, Homo sapiens
RTIQYNMTRTRDKYLHTNCLAALANMSAQFRSLHQYAAQRIISLFSLLSKKHN

SEQ ID NO: 984 - protein, 56 aa, Homo sapiens
SCLTNSLHHNPNLVYALLYKRDLFEQFRTHPSFQDIMQNIDLVISFFSSRLLQAGS

SEQ ID NO: 985 - protein, 31 aa, Homo sapiens
KKHNKVLEQATQSLRGSLSSNDVPLPDYAQD

SEQ ID NO: 986 - protein, 15 aa, Homo sapiens
TISNSSFISGYNAKY

SEQ ID NO: 987 - protein, 31 aa, Homo sapiens
LKVAASWELSCQWNGSWKSLSKASLRCPKTD

SEQ ID NO: 988 - protein, 125 aa, Homo sapiens [sequence omitted]

SEQ ID NO: 989 - protein, 79 aa, Homo sapiens
MKMQRTIVIRRDYLHYIRKYNRFEKRHKNMSVHLSPCFRDVQIGDIVTVGECRPLSKTVRFNVLKVTKAAGTKKQFQKF

SEQ ID NO: 990 - protein, 30 aa, Homo sapiens
MADIQTERAYQKQPTIFQNKKRVLLGETGK

SEQ ID NO: 991 - protein, 58 aa, Homo sapiens
KLPRVTNKNIGLGFKDTPRRLLRGTYIDKKCPFTGNVSIRGRILSGVVTQDEDAEDHC

SEQ ID NO: 992 - protein, 38 aa, Homo sapiens
HCHPPRLSALHPQVQPLREAPQEHVCTPVPLLQGRPDR

SEQ ID NO: 993 - protein, 36 aa, Homo sapiens
MKMQRTIVIRRDYLHYIRKYNRFEKRHKNMSVHLSP

SEQ ID NO: 994 - protein, 43 aa, Homo sapiens
CFRDVQIGDIVTVGECRPLSKTVRFNVLKVTKAAGTKKQFQKF

SEQ ID NO: 995 - protein, 33 aa, Homo sapiens
PRRLLRGTYIDKKCPFTGNVSIRGRILSGVVTQ

SEQ ID NO: 996 - protein, 29 aa, Homo sapiens
SRGTGVQTCSCGASRSGCTCGCSADSLGG

SEQ ID NO: 997 - protein, 32 aa, Homo sapiens
QWSSASSSWVTTPERIRPRMDTLPVKGHFLSM

SEQ ID NO: 998 - protein, 60 aa, Homo sapiens
IFYDSDWNPTVDQQAMDRAHRLGQTKQVTVYRLICKGTIEERILQRAKEKSEIQRMVISG

SEQ ID NO: 999 - protein, 67 aa, Homo sapiens
  SITE (19): Xaa equals any of the naturally occurring L-amino acids
  SITE (62): Xaa equals any of the naturally occurring L-amino acids
TRMIDLLEEYMVYRKHTYXRLDGSSKISERRDMVADFQNRNDIFVFLLSTRAGGLGINLTAXDTVHF

SEQ ID NO: 1000 - protein, 32 aa, Homo sapiens
IFYDSDWNPTVDQQAMDRAHRLGQTKQVTVYR

SEQ ID NO: 1001 - protein, 31 aa, Homo sapiens
VYRLICKGTIEERILQRAKEKSEIQRMVISG

SEQ ID NO: 1002 - protein, 33 aa, Homo sapiens
  SITE (19): Xaa equals any of the naturally occurring L-amino acids
TRMIDLLEEYMVYRKHTYXRLDGSSKISERRDM

SEQ ID NO: 1003 - protein, 38 aa, Homo sapiens
  SITE (33): Xaa equals any of the naturally occurring L-amino acids
RRDMVADFQNRNDIFVFLLSTRAGGLGINLTAXDTVHF

SEQ ID NO: 1004 - protein, 37 aa, Homo sapiens
IFYDSDWNPTVDQQAMDRAHRLGQTKQVTVYRLICKG

SEQ ID NO: 1005 - protein, 37 aa, Homo sapiens; identical to SEQ ID NO: 1004

SEQ ID NO: 1006 - protein, 29 aa, Homo sapiens
RLICKGTIEERILQRAKEKSEIQRMVISG

SEQ ID NO: 1007 - protein, 69 aa, Homo sapiens
  SITE (20): Xaa equals any of the naturally occurring L-amino acids
  SITE (63): Xaa equals any of the naturally occurring L-amino acids
GTRMIDLLEEYMVYRKHTYXRLDGSSKISERRDMVADFQNRNDIFVFLLSTRAGGLGINLTAXDTVHFL

SEQ ID NO: 1008 - protein, 364 aa, Homo sapiens
  SITE (259): Xaa equals any of the naturally occurring L-amino acids
  SITE (312): Xaa equals any of the naturally occurring L-amino acids
MSLHGKRKEIYKYEAPWTVYAMNWSVRPDKRFRLALGSFVEEYNNKVQLVGLDEESSEFICRNTFDHPYPTTKLMWIPDTKGVYPDLLATSGDYLRVWRVGETETRLECLLNNNKNSDFCAPLTSFDWNEVDPYLLGTSSIDTTCTIWGLETGQVLGRVNLVSGHVKTQLIAHDKEVYDIAFSRAGGGRDMFASVGADGSVRMFDLRHLEHSTIIYEDPQHHPLLRLCWNKQDPNYLATMAMDGMEVVILDVRVPAHLXPGTTIEHVSMALLGPHIHPATSALQRMTTRLSSGTSSKCPEPLRTLSWPTQLXGEINNVQWASTQPELSPSATTTAWRYSECSVGGAVPTRQGLLYFLPLPHPQS

SEQ ID NO: 1009 - protein, 136 aa, Homo sapiens
MSLHGKRKEIYKYEAPWTVYAMNWSVRPDKRFRLALGSFVEEYNNKVQLVGLDEESSEFICRNTFDHPYPTTKLMWIPDTKGVYPDLLATSGDYLRVWRVGETETRLECLLNNNKNSDFCAPLTSFDWNEVDPYLL

SEQ ID NO: 1010 - protein, 140 aa, Homo sapiens
  SITE (135): Xaa equals any of the naturally occurring L-amino acids
SFDWNEVDPYLLGTSSIDTTCTIWGLETGQVLGRVNLVSGHVKTQLIAHDKEVYDIAFSRAGGGRDMFASVGADGSVRMFDLRHLEHSTIIYEDPQHHPLLRLCWNKQDPNYLATMAMDGMEVVILDVRVPAHLXPGTTI

SEQ ID NO: 1011 - protein, 170 aa, Homo sapiens
  SITE (65): Xaa equals any of the naturally occurring L-amino acids
  SITE (118): Xaa equals any of the naturally occurring L-amino acids
VGADGSVRMFDLRHLEHSTIIYEDPQHHPLLRLCWNKQDPNYLATMAMDGMEVVILDVRVPAHLXPGTTIEHVSMALLGPHIHPATSALQRMTTRLSSGTSSKCPEPLRTLSWPTQLXGEINNVQWASTQPELSPSATTTAWRYSECSVGGAVPTRQGLLYFLPLPHPQS

SEQ ID NO: 1012 - protein, 286 aa, Homo sapiens
  SITE (15): Xaa equals any of the naturally occurring L-amino acids
  SITE (258): Xaa equals any of the naturally occurring L-amino acids
LYATATVISSPSTEXLSQDQGDRASLDAADSGRGSWTSCSSGSHDNIQTIQHQRSWETLPFGHTHFDYSGDPAGLWASSSHMDQIMFSDHSTKYNRQNQSRESLEQAQSRASWASSTGYWGEDSEGDTGTIKRRGGKDVSIEAESSSLTSVTTEETKPVPMPAHIAVASSTTKGLIARKEGRYREPPPTPPGYIGIPITDFPEGHSHPARKPPDYNVALQRSRMVARSSDTAGPSSVQQPHGHPTSSRPVNKPQWHKXNESDPRLAPYQSQGFSTEEDEDEQVSAV

SEQ ID NO: 1013 - protein, 42 aa, Homo sapiens
HMDQIMFSDHSTKYNRQNQSRESLEQAQSRASWASSTGYWGE

SEQ ID NO: 1014 - protein, 51 aa, Homo sapiens
SVTTEETKPVPMPAHIAVASSTTKGLIARKEGRYREPPPTPPGYIGIPITD

SEQ ID NO: 1015 - protein, 57 aa, Homo sapiens
  SITE (42): Xaa equals any of the naturally occurring L-amino acids
VALQRSRMVARSSDTAGPSSVQQPHGHPTSSRPVNKPQWHKXNESDPRLAPYQSQGF

SEQ ID NO: 1016 - protein, 41 aa, Homo sapiens
CLLFVFVSLGMRCLFWTIVYNVLYLKHKCNTVLLCYHLCSI

SEQ ID NO: 1017 - protein, 67 aa, Homo sapiens
  SITE (34): Xaa equals any of the naturally occurring L-amino acids
  SITE (46): Xaa equals any of the naturally occurring L-amino acids
  SITE (47): Xaa equals any of the naturally occurring L-amino acids
  SITE (65): Xaa equals any of the naturally occurring L-amino acids
ACSKLIPAFEMVMRAKDNVYHLDCFACQLCNQRXCVGDKFFLKNNXXLCQTDYEEGLMKEGYAPXVR

SEQ ID NO: 1018 - protein, 45 aa, Homo sapiens
SALSEPGAPDRRRPCPESVPRRPDDEQWPPPTALCLDVAPLPPSS

SEQ ID NO: 1019 - protein, 43 aa, Homo sapiens
PVGYLDKQVPDTSVQETDRILVEKRCWDIALGPLKQIPMNLFI

SEQ ID NO: 1020 - protein, 214 aa, Homo sapiens
AHASESGERWWACCGVRFGLRSIEAIGRSCCHDGPGGLVANRGRRFKWAIELSGPGGGSRGRSDRGSGQGDSLYPVGYLDKQVPDTSVQETDRILVEKRCWDIALGPLKQIPMNLFIMYMAGNTISIFPTMMVCMMAWRPIQALMAISATFKMLESSSQKFLQGLVYLIGNLMGLALAVYKCQSMGLLPTHASDWLAFIEPPERMEFSGGGLLL

SEQ ID NO: 1021 - protein, 46 aa, Homo sapiens
ATFKMLESSSQKFLQGLVYLIGNLMGLALAVYKCQSMGLLPTHASD

SEQ ID NO: 1022 - protein, 43 aa, Homo sapiens; identical to SEQ ID NO: 1019

SEQ ID NO: 1023 - protein, 48 aa, Homo sapiens
PTTKLDIMEKKKHIQIRFPSFYHKLVDSGRMRSKRETRREDSDTKHNL

SEQ ID NO: 1024 - protein, 16 aa, Homo sapiens
FLWKSLLLRYFKMRQH

SEQ ID NO: 1025 - protein, 36 aa, Homo sapiens [sequence omitted]

SEQ ID NO: 1026 - protein, 167 aa, Homo sapiens
TEHIIAVMITELRGKDILSYLEKNISVQMTIAVGTRMPPKNFSRGSLVFVSISFIVLMIISSAWLIFYFIQKIRYTNARDRNQRRLGDAAKKAISKLTTRTVKKGDKETDPDFDHCAVCIESYKQNDVVRILPCKHVFHKSCVDPWLSEHCTCPMCKLNILKALGIV

SEQ ID NO: 1027 - protein, 276 aa, Homo sapiens
MTHPGTEHIIAVMITELRGKDILSYLEKNISVQMTIAVGTRMPPKNFSRGSLVFVSISFIVLMIISSAWLIFYFIQKIRYTNARDRNQRRLGDAAKKAISKLTTRTVKKGDKETDPDFDHCAVCIESYKQNDVVRILPCKHVFHKSCVDPWLSEHCTCPMCKLNILKALGIVPNLPCTDNVAFDMERLTRTQAVNRRSALGDLAGDNSLGLEPLRTSGISPLPQDGELTPRTGEINIAVTKEWFIIASFGLLSALTLCYMIIRATASLNANEVEWF

SEQ ID NO: 1028 - protein, 69 aa, Homo sapiens
TEHIIAVMITELRGKDILSYLEKNISVQMTIAVGTRMPPKNFSRGSLVFVSISFIVLMIISSAWLIFYF

SEQ ID NO: 1029 - protein, 58 aa, Homo sapiens
SISFIVLMIISSAWLIFYFIQKIRYTNARDRNQRRLGDAAKKAISKLTTRTVKKGDKE

SEQ ID NO: 1030 - protein, 66 aa, Homo sapiens
VKKGDKETDPDFDHCAVCIESYKQNDVVRILPCKHVFHKSCVDPWLSEHCTCPMCKLNILKALGIV

SEQ ID NO: 1031 - protein, 106 aa, Homo sapiens
MTHPGTEHIIAVMITELRGKDILSYLEKNISVQMTIAVGTRMPPKNFSRGSLVFVSISFIVLMIISSAWLIFYFIQKIRYTNARDRNQRRLGDAAKKAISKLTTRT

SEQ ID NO: 1032 - protein, 84 aa, Homo sapiens
AAKKAISKLTTRTVKKGDKETDPDFDHCAVCIESYKQNDVVRILPCKHVFHKSCVDPWLSEHCTCPMCKLNILKALGIVPNLPC

SEQ ID NO: 1033 - protein, 86 aa, Homo sapiens
TQAVNRRSALGDLAGDNSLGLEPLRTSGISPLPQDGELTPRTGEINIAVTKEWFIIASFGLLSALTLCYMIIRATASLNANEVEWF

SEQ ID NO: 1034 - protein, 341 aa, Homo sapiens
PLHGVADHLGCDPQTRFFVPPNIKQWIALLQRGNCTFKEKISRAAFHNAVAVVIYNNKSKEEPVTMTHPGTEHIIAVMITELRGKDILSYLEKNISVQMTIAVGTRMPPKNFSRGSLVFVSISFIVLMIISSAWLIFYFIQKIRYTNARDRNQRRLGDAAKKAISKLTTRTVKKGDKETDPDFDHCAVCIESYKQNDVVRILPCKHVFHKSCVDPWLSEHCTCPMCKLNILKALGIVPNLPCTDNVAFDMERLTRTQAVNRRSALGDLAGDNSLGLEPLRTSGISPLPQDGELTPRTGEINIAVTKEWFIIASFGLLSALTLCYMIIRATASLNANEVEWF

SEQ ID NO: 1035 - protein, 60 aa, Homo sapiens
HGVADHLGCDPQTRFFVPPNIKQWIALLQRGNCTFKEKISRAAFHNAVAVVIYNNKSKEE

SEQ ID NO: 1036 - protein, 314 aa, Homo sapiens
  SITE (189): Xaa equals any of the naturally occurring L-amino acids
MSGQGLAGFFASVAMICAIASGSELSESAFGYFITACAVIILTIICYLGLPRLEFYRYYQQLKLEGPGEQETKLDLISKGEEPRAGKEESGVSVSNSQPTNESHSIKAILKNISVLAFSVCFIFTITIGMFPAVTVEVKSSIAGSSTWERYFIPVSCFLTFNIFDWLGRSLTAVFMWPGKDSRWLPSWXLARLVFVPLLLLCNIKPRRYLTVVFEHDAWFIFFMAAFAFSNGYLASLCMCFGPKKVKPAEAETAEPSWPSSCVWVWHWGLFSPSCSGQLCDKGWTEGLPASLPVCLLPLPSARGDPEWSGGFFF

SEQ ID NO: 1037 - protein, 106 aa, Homo sapiens
MSGQGLAGFFASVAMICAIASGSELSESAFGYFITACAVIILTIICYLGLPRLEFYRYYQQLKLEGPGEQETKLDLISKGEEPRAGKEESGVSVSNSQPTNESHSI

SEQ ID NO: 1038 - protein, 81 aa, Homo sapiens
SGVSVSNSQPTNESHSIKAILKNISVLAFSVCFIFTITIGMFPAVTVEVKSSIAGSSTWERYFIPVSCFLTFNIFDWLGRS

SEQ ID NO: 1039 - protein, 92 aa, Homo sapiens
  SITE (63): Xaa equals any of the naturally occurring L-amino acids
TIGMFPAVTVEVKSSIAGSSTWERYFIPVSCFLTFNIFDWLGRSLTAVFMWPGKDSRWLPSWXLARLVFVPLLLLCNIKPRRYLTVVFEHDA

SEQ ID NO: 1040 - protein, 74 aa, Homo sapiens
FGPKKVKPAEAETAEPSWPSSCVWVWHWGLFSPSCSGQLCDKGWTEGLPASLPVCLLPLPSARGDPEWSGGFFF

SEQ ID NO: 1041 - protein, 135 aa, Homo sapiens
  SITE (96): Xaa equals any of the naturally occurring L-amino acids
  SITE (97): Xaa equals any of the naturally occurring L-amino acids
  SITE (98): Xaa equals any of the naturally occurring L-amino acids
  SITE (99): Xaa equals any of the naturally occurring L-amino acids
  SITE (100): Xaa equals any of the naturally occurring L-amino acids
  SITE (101): Xaa equals any of the naturally occurring L-amino acids
  SITE (102): Xaa equals any of the naturally occurring L-amino acids
  SITE (103): Xaa equals any of the naturally occurring L-amino acids
  SITE (104): Xaa equals any of the naturally occurring L-amino acids
  SITE (105): Xaa equals any of the naturally occurring L-amino acids
  SITE (106): Xaa equals any of the naturally occurring L-amino acids
  SITE (107): Xaa equals any of the naturally occurring L-amino acids
  SITE (108): Xaa equals any of the naturally occurring L-amino acids
  SITE (109): Xaa equals any of the naturally occurring L-amino acids
  SITE (110): Xaa equals any of the naturally occurring L-amino acids
  SITE (111): Xaa equals any of the naturally occurring L-amino acids
  SITE (112): Xaa equals any of the naturally occurring L-amino acids
  SITE (130): Xaa equals any of the naturally occurring L-amino acids
DDDGFEIVPIEDPAKHRILDPEGLALGAVIASSKKAKRDLIDNSFNRYTFNEDEGELPEWFVQEEKQHRIRQLPVGKKEVEHYRKRWREINARPIXXXXXXXXXXXXXXXXXLEQTRKKAEAVVNTVDIXRTRES

SEQ ID NO: 1042 - protein, 50 aa, Homo sapiens
DDDGFEIVPIEDPAKHRILDPEGLALGAVIASSKKAKRDLIDNSFNRYTF

SEQ ID NO: 1043 - protein, 51 aa, Homo sapiens
  SITE (12): Xaa equals any of the naturally occurring L-amino acids
  SITE (13): Xaa equals any of the naturally occurring L-amino acids
  SITE (14): Xaa equals any of the naturally occurring L-amino acids
  SITE (15): Xaa equals any of the naturally occurring L-amino acids
  SITE (16): Xaa equals any of the naturally occurring L-amino acids
  SITE (17): Xaa equals any of the naturally occurring L-amino acids
  SITE (18): Xaa equals any of the naturally occurring L-amino acids
  SITE (19): Xaa equals any of the naturally occurring L-amino acids
  SITE (20): Xaa equals any of the naturally occurring L-amino acids
  SITE (21): Xaa equals any of the naturally occurring L-amino acids
  SITE (22): Xaa equals any of the naturally occurring L-amino acids
  SITE (23): Xaa equals any of the naturally occurring L-amino acids
  SITE (24): Xaa equals any of the naturally occurring L-amino acids
  SITE (25): Xaa equals any of the naturally occurring L-amino acids
  SITE (26): Xaa equals any of the naturally occurring L-amino acids
  SITE (27): Xaa equals any of the naturally occurring L-amino acids
  SITE (28): Xaa equals any of the naturally occurring L-amino acids
  SITE (46): Xaa equals any of the naturally occurring L-amino acids
KRWREINARPIXXXXXXXXXXXXXXXXXLEQTRKKAEAVVNTVDIXRTRES

SEQ ID NO: 1044 - protein, 216 aa, Homo sapiens
MIKDKGRARTALTSSQPAHLCPENPLLHLKAAVKEKKRNKKKKTIGSPKRIQSPLNNKLLNSPAKTLPGACGSPQKLIDGFLKHEGPPAEKPLEELSASTSGVPGLSSLQSDPAGCVRPPAPNLAGAVEFNDVKTLLREWITTISDPMEEDILQVVKYCTDLIEEKDLEKLDLVIKYMKRLMQQSVESVWNMAFDFILDNVQVVLQQTYGSTLKVT

SEQ ID NO: 1045 - protein, 52 aa, Homo sapiens
MIKDKGRARTALTSSQPAHLCPENPLLHLKAAVKEKKRNKKKKTIGSPKRIQ

SEQ ID NO: 1046 - protein, 100 aa, Homo sapiens
KRIQSPLNNKLLNSPAKTLPGACGSPQKLIDGFLKHEGPPAEKPLEELSASTSGVPGLSSLQSDPAGCVRPPAPNLAGAVEFNDVKTLLREWITTISDPM

SEQ ID NO: 1047 - protein, 74 aa, Homo sapiens
TISDPMEEDILQVVKYCTDLIEEKDLEKLDLVIKYMKRLMQQSVESVWNMAFDFILDNVQVVLQQTYGSTLKVT

SEQ ID NO: 1048 - protein, 156 aa, Homo sapiens
VCCKTTWTLSRIKSNAIFQTDSTDCCISLFMYFITRSSFSKSFSSIRSVQYFTTWRMSSSIGSEIVVIHSLSKVFTSLNSTAPARLGAGGLTQPAGSDCKLERPGTPEVEAESSSRGFSAGGPSCFRNPSINFWGLPQAPGRVFAGLLSSLLFKGL

SEQ ID NO: 1049 - protein, 25 aa, Homo sapiens
WTLSRIKSNAIFQTDSTDCCISLFM

SEQ ID NO: 1050 - protein, 37 aa, Homo sapiens
FTTWRMSSSIGSEIVVIHSLSKVFTSLNSTAPARLGA

SEQ ID NO: 1051 - protein, 28 aa, Homo sapiens
GGPSCFRNPSINFWGLPQAPGRVFAGLL

SEQ ID NO: 1052 - protein, 18 aa, Homo sapiens
FCHDCKFPEASPAMNCEP

SEQ ID NO: 1053 - protein, 18 aa, Homo sapiens
FCHDCKFPEASPAMNCEP

SEQ ID NO: 1054 - protein, 9 aa, Homo sapiens
HEPYAVLVI

SEQ ID NO: 1055 - protein, 27 aa, Homo sapiens
PQPSNFPTTVRNLPYSGAGAQPPPSNC

SEQ ID NO: 1056 - protein, 134 aa, Homo sapiens
  SITE (130): Xaa equals any of the naturally occurring L-amino acids
MASSVPAGGHTRAGGIFLIGKLDLEASLFKSFQWLPFVLRKKCNFFCWDSSAHSLPLHPLSASCSAPACHASDTHLLYPSTRALCPSIFAWLVAPHSVFRTNAPGPTPSSQSSPVFPVFPVSFMALIVCXLVCC

SEQ ID NO: 1057 - protein, 71 aa, Homo sapiens
MASSVPAGGHTRAGGIFLIGKLDLEASLFKSFQWLPFVLRKKCNFFCWDSSAHSLPLHPLSASCSAPACHA

SEQ ID NO: 1058 - protein, 46 aa, Homo sapiens
  SITE (42): Xaa equals any of the naturally occurring L-amino acids
FAWLVAPHSVFRTNAPGPTPSSQSSPVFPVFPVSFMALIVCXLVCC

SEQ ID NO: 1059 - protein, 134 aa, Homo sapiens; identical to SEQ ID NO: 1056
  SITE (130): Xaa equals any of the naturally occurring L-amino acids

SEQ ID NO: 1060 - protein, 118 aa, Homo sapiens
  SITE (112): Xaa equals any of the naturally occurring L-amino acids
LVNWILKLHCLNLFSGFPLYLEKNATSSAGTHPLTAFPSTLSLPHALPLPAMPPILTFCTPAPVPSAPRSLPGWLLLTQCSGQMLLALPHLASLARSSLSSLFHSWLLLFVXLCAVDF

SEQ ID NO: 1061 - protein, 23 aa, Homo sapiens
NLFSGFPLYLEKNATSSAGTHPL

SEQ ID NO: 1062 - protein, 21 aa, Homo sapiens
PHLASLARSSLSSLFHSWLLL

SEQ ID NO: 1063 - protein, 286 aa, Homo sapiens; identical to SEQ ID NO: 404

SEQ ID NO: 1064 - protein, 16 aa, Homo sapiens
AHASAHASGGAEYGAL

SEQ ID NO: 1065 - protein, 116 aa, Homo sapiens
QYSQYVQSAQLGWTDSCHMLFVTASFRFFSLSASMGSAFSPSISHAHTCLFWNCHLWNSDCNSTYGIDRETDFFPERSCIQYIPARRCFRKYAWPSDPGVRGPHFLDSHQTAMETS

SEQ ID NO: 1066 - protein, 34 aa, Homo sapiens
ASMGSAFSPSISHAHTCLFWNCHLWNSDCNSTYG

SEQ ID NO: 1067 - protein, 119 aa, Homo sapiens
FVHVVARVGWHGTSCSLFSASIWMKNGRIWLLRTFPLRSGDYPKNEGPEHQDQKAKRIYENTFWRECTVCRISQGKNQFLCQSHKCCCNHCSKDDNSRINMYGHEKCSERKRSPWKQKD

SEQ ID NO: 1068 - protein, 32 aa, Homo sapiens
ASIWMKNGRIWLLRTFPLRSGDYPKNEGPEHQ

SEQ ID NO: 1069 - protein, 43 aa, Homo sapiens [sequence omitted]

SEQ ID NO: 1070 - protein, 42 aa, Homo sapiens [sequence omitted]

SEQ ID NO: 1071 - protein, 351 aa, Homo sapiens
NGQASTAKMSSCLRSPPTLAPLSLTSGIPVQSWCGASSQLLQQAVDRAQQLLEVALVLTILQLQAGQHLVLSLQAGQCPAELGVLTVAVPAGGQEDAQCLQHLLTGIMLGQRQEVGRDLAPALFPQAWQEVYLAILLQLLWGHLLGQLSLLLGEHLLRDQVVEQCDHAHGEHLRALLLHQGPQDLQPPELQELPLGIGEVAQQGAQCKQDLLLCSERLLRGQDDQQLLQGSPFDGLHLDLGVAGKGSAQHKRSILLHEGLCAVQPIDHHLKTTKGKQVLRIVHLMDIIFKIKERSNLLFQTGAGTIELVDQPYHDLHVSLNDNIQLIKVFLQFLNGAEEPLYLSLPCLVFL

SEQ ID NO: 1072 - protein, 33 aa, Homo sapiens
QHLVLSLQAGQCPAELGVLTVAVPAGGQEDAQC

SEQ ID NO: 1073 - protein, 26 aa, Homo sapiens
QLSLLLGEHLLRDQVVEQCDHAHGEH

SEQ ID NO: 1074 - protein, 32 aa, Homo sapiens
GSPFDGLHLDLGVAGKGSAQHKRSILLHEGLC

SEQ ID NO: 1075 - protein, 30 aa, Homo sapiens
HLMDIIFKIKERSNLLFQTGAGTIELVDQP

SEQ ID NO: 1076 - protein, 126 aa, Homo sapiens
DEPCPPPAASCAPPSWRMELRTGSVGSQAVARRMDGDSRDGGGGKDATGSEDYENLPTSASVSTHMTAGAMAGILEHSVMYPVDSVKTRMQSLSPDPKAQYTSIYGALKKIMRTEASGGPCEASTS

SEQ ID NO: 1077 - protein, 34 aa, Homo sapiens
RMELRTGSVGSQAVARRMDGDSRDGGGGKDATGS

SEQ ID NO: 1078 - protein, 27 aa, Homo sapiens
PVDSVKTRMQSLSPDPKAQYTSIYGAL

SEQ ID NO: 1079 - protein, 424 aa, Homo sapiens
  SITE (152): Xaa equals any of the naturally occurring L-amino acids
  SITE (314): Xaa equals any of the naturally occurring L-amino acids
  SITE (359): Xaa equals any of the naturally occurring L-amino acids
MKLLGECSSSIDSVKRLEHKLKEEEESLPGFVNLHSTETQTAGVIDRWELLQAQALSKELRMKQNLQKWQQFNSDLNSIWAWLGDTEEELEQLQRLELSTDIQTIELQIKKLKELQKAVDHRKAIILSINLCSPEFTQADSKESRDLQDRLXQMNGRWDRVCSLLEEWRGLLQDALMQCQGFHEMSHGLLLMLENIDRRKNEIVPIDSNLDAEILQDHHKQLMQIKHELLESQLRVASLQDMSCQLLVNAEGTDCLEAKEKVHVIGNRLKLLLKEVSRHIKELEKLLDVSSSQQDLSSWSSADELDTSGSVSPXSGRSTPNRQKTPRGKCSLSQPGPSVSSPHSRSTKGGSDSSLSEPXPGRSGRGFLFRVLRAALPLQLLLLLLIGLACLVPMSEEDYSCALSNNFARSFHPMLRYTNGPPPL

SEQ ID NO: 1080 - protein, 110 aa, Homo sapiens
MKLLGECSSSIDSVKRLEHKLKEEEESLPGFVNLHSTETQTAGVIDRWELLQAQALSKELRMKQNLQKWQQFNSDLNSIWAWLGDTEEELEQLQRLELSTDIQTIELQIK

SEQ ID NO: 1081 - protein, 136 aa, Homo sapiens
  SITE (42): Xaa equals any of the naturally occurring L-amino acids
KLKELQKAVDHRKAIILSINLCSPEFTQADSKESRDLQDRLXQMNGRWDRVCSLLEEWRGLLQDALMQCQGFHEMSHGLLLMLENIDRRKNEIVPIDSNLDAEILQDHHKQLMQIKHELLESQLRVASLQDMSCQL

SEQ ID NO: 1082 - protein, 105 aa, Homo sapiens
  SITE (75): Xaa equals any of the naturally occurring L-amino acids
QDMSCQLLVNAEGTDCLEAKEKVHVIGNRLKLLLKEVSRHIKELEKLLDVSSSQQDLSSWSSADELDTSGSVSPXSGRSTPNRQKTPRGKCSLSQPGPSVSSPHS

SEQ ID NO: 1083 - protein, 73 aa, Homo sapiens
  SITE (8): Xaa equals any of the naturally occurring L-amino acids
DSSLSEPXPGRSGRGFLFRVLRAALPLQLLLLLLIGLACLVPMSEEDYSCALSNNFARSFHPMLRYTNGPPPL

SEQ ID NO: 1084 - protein, 60 aa, Homo sapiens
  SITE (10): Xaa equals any of the naturally occurring L-amino acids
QRFLPPGSCXLIRGPQCPRVTDPTTGQSLDDSRFQIQQTENIIRSKTPTGPELDTSYKGY

SEQ ID NO: 1085 - protein, 215 aa, Homo sapiens
  SITE (64): Xaa equals any of the naturally occurring L-amino acids
SISASRLESIGTISFFLLSMFSSIRSKPWLISWKPWHCIRASCSRPRHSSSREHTRSQRPFICXKRSCRSRLSLLSAWVNSGLQRLMERMMALRWSTAFWSSLSFLIWSSMVWMSVLSSRRWSCSNSSSVSPSQAQMLFKSELNCCHFWRFCFILNSLLNAWAWRSSHRSITPAVWVSVLCRLTKPGRLSSSSFSLCSSLFTESILLLHSPSSFM

SEQ ID NO: 1086 - protein, 35 aa, Homo sapiens
TAFWSSLSFLIWSSMVWMSVLSSRRWSCSNSSSVS

SEQ ID NO: 1087 - protein, 26 aa, Homo sapiens
LLNAWAWRSSHRSITPAVWVSVLCRL

SEQ ID NO: 1088 - protein, 171 aa, Homo sapiens
  SITE (94): Xaa equals any of the naturally occurring L-amino acids
LARHVLQRGYSELGFQQLMLYLHKLFVMVLKYLCIKVRINRDNFIFPSVNVLQHKKQTMAHFMETLALHQGILQQAPPLLQQRAHSVPAPIHLXQAILQVPALLAVSLGELRAAEIDGEDDGFAVVHSFLELLELFDLELDGLDVSAEFQTLELFQLLLRVPQPGPDAVQV

SEQ ID NO: 1089 - protein, 28 aa, Homo sapiens
YSELGFQQLMLYLHKLFVMVLKYLCIKV

SEQ ID NO: 1090 - protein, 29 aa, Homo sapiens
VHSFLELLELFDLELDGLDVSAEFQTLEL

SEQ ID NO: 1091 - protein, 15 aa, Homo sapiens
AMVCFLCWRTLTEGK

SEQ ID NO: 1092 - protein, 97 aa, Homo sapiens
  SITE (73): Xaa equals any of the naturally occurring L-amino acids
GAGVGTAMPRVPQSAGGAVTWWGVGLSQPSSVQGGARPGTVPGTPGPLPGLSPAPPPQHPPPLPKLFLLCLSXSLPQDFSLLLCLSLDPCPSSTSDL

SEQ ID NO: 1093 - protein, 30 aa, Homo sapiens
GTVPGTPGPLPGLSPAPPPQHPPPLPKLFL

SEQ ID NO: 1094 - protein, 158 aa, Homo sapiens
  SITE (83): Xaa equals any of the naturally occurring L-amino acids
  SITE (136): Xaa equals any of the naturally occurring L-amino acids
APSRCRRSVVQVPYSAFSSCSWTPTALRRGVLLYAGLSTSSASKAQGWHCLGLEYPSGAIMEVRGRGGDRYAQGPSKCWRGCXLVGSGSVTAILCPGWGKAWDSARHPRTPSRLVSCSTASTPPTPAQAVSPLPLXFPAPGLLSSPLPLLGPLPFLYL

SEQ ID NO: 1095 - protein, 37 aa, Homo sapiens
TALRRGVLLYAGLSTSSASKAQGWHCLGLEYPSGAIM

SEQ ID NO: 1096 - protein, 33 aa, Homo sapiens
AILCPGWGKAWDSARHPRTPSRLVSCSTASTPP

SEQ ID NO: 1097 - protein, 112 aa, Homo sapiens
  SITE (11): Xaa equals any of the naturally occurring L-amino acids
  SITE (28): Xaa equals any of the naturally occurring L-amino acids
  SITE (67): Xaa equals any of the naturally occurring L-amino acids
PPVFMASHRPXGMEPGEWRFVLVHIAFXCAWDLVCEHVSVCSQVRGRGRAGVQGEAEEKREVLGQGXREAEEKQLGQGWGVLRRWSRRQAWKGSWGAWHCPRPCPTLDRGWL

SEQ ID NO: 1098 - protein, 29 aa, Homo sapiens
HVSVCSQVRGRGRAGVQGEAEEKREVLGQ

SEQ ID NO: 1099 - protein, 56 aa, Homo sapiens
MKLLICGNYLAPSHSESSRRCCLLCFYPLCLEINFGMKVFLSMPFLVLFQSLIQED

SEQ ID NO: 1100 - protein, 50 aa, Homo sapiens
FSSPQGLKFRSKSSLANYLHKNGETSLKPEDFDFTVLSKRGIKSRYKDCS

SEQ ID NO: 1101 - protein, 137 aa, Homo sapiens
ELLCYICWKNTGLFSFFLSVFRGMVSSVKSFLVGEQLLSISEPRFKMSVCKCSFLSTTSTFVPISSDSKKVSSYFSLCSESLAEQNLFMMPEVFCSEQKFDPELNDLSFFFTRLFSSLVTLRVSPHAPASEMQTVLS

SEQ ID NO: 1102 - protein, 36 aa, Homo sapiens
TFVPISSDSKKVSSYFSLCSESLAEQNLFMMPEVFC

SEQ ID NO: 1103 - protein, 271 aa, Homo sapiens
  SITE (112): Xaa equals any of the naturally occurring L-amino acids
  SITE (231): Xaa equals any of the naturally occurring L-amino acids
RILLVKYSANEENKYDYLPTTVNVCSELVKLVFCVLVSFCVIKKDHQSRNLKYASWKEFSDFMKWSIPAFLYFLDNLIVFYVLSYLQPAMAVIFSNFSIITTALLFRIVLKXRLNWIQWASLLTLFLSIVALTAGTKTLQHNLAGRGFHHDAFFSPSNSCLLFRNECPRKDNCTAKEWTFPEAKWNTTARVFSHIRLGMGHVLIIVQCFISSMANIYNEKILKEGNQLTEXIFIQNSKLYFFGILFNGLTLGLQRSNRDQIKNCGFFYGHS

SEQ ID NO: 1104 - protein, 30 aa, Homo sapiens
TVNVCSELVKLVFCVLVSFCVIKKDHQSRN

SEQ ID NO: 1105 - protein, 31 aa, Homo sapiens
LIVFYVLSYLQPAMAVIFSNFSIITTALLFR

SEQ ID NO: 1106 - protein, 27 aa, Homo sapiens
FFSPSNSCLLFRNECPRKDNCTAKEWT

SEQ ID NO: 1107 - protein, 28 aa, Homo sapiens
YFFGILFNGLTLGLQRSNRDQIKNCGFF

SEQ ID NO: 1108 - protein, 94 aa, Homo sapiens
  SITE (25): Xaa equals any of the naturally occurring L-amino acids
NSVPNLQTLAVLTEAIGPEPAIPRXPREPPVATSTPATPSAGPQPLPTGTVLVPGGPAPPCLGEAWALLLPPCRPSLTSCFWSPRPSPWKETGV

SEQ ID NO: 1109 - protein, 64 aa, Homo sapiens
  SITE (53): Xaa equals any of the naturally occurring L-amino acids
VTAGRVGGGGPMPPQGKVGQDPQGPARSRLGGAGARQRVWQVWTWQQAAPGGXGGWRALGQWPQ

SEQ ID NO: 1110 - protein, 26 aa, Homo sapiens
STPATPSAGPQPLPTGTVLVPGGPAP

SEQ ID NO: 1111 - protein, 19 aa, Homo sapiens
QDPQGPARSRLGGAGARQR

SEQ ID NO: 1112 - protein, 40 aa, Homo sapiens
  SITE (28): Xaa equals any of the naturally occurring L-amino acids
ALQLAFYPDAVEEWLEENVHPSLQRLQXLLQDLSEVSAPP

SEQ ID NO: 1113 - protein, 30 aa, Homo sapiens
CHPPALAGTLLRTPEGRAHARGLLLEAGGA

SEQ ID NO: 1114 - protein, 59 aa, Homo sapiens
GSSSTRSWFSTSSPQRSASWHSGAPSCRSWRLPCSWLSTRMPWRSGWRKTCTPACSGCK

SEQ ID NO: 1115 - protein, 83 aa, Homo sapiens
  SITE (16): Xaa equals any of the naturally occurring L-amino acids
  SITE (24): Xaa equals any of the naturally occurring L-amino acids
ASTLQPSLSPSSPPLXPPVETAVXSRALRREGAGSFPGSNILALVTQVSLHLRSSVDALLEGNRYVTGWFSPYHRQRKLIHPV

SEQ ID NO: 1116 - protein, 292 aa, Homo sapiens
  SITE (11): Xaa equals any of the naturally occurring L-amino acids
  SITE (15): Xaa equals any of the naturally occurring L-amino acids
  SITE (35): Xaa equals any of the naturally occurring L-amino acids
  SITE (36): Xaa equals any of the naturally occurring L-amino acids
  SITE (39): Xaa equals any of the naturally occurring L-amino acids
  SITE (40): Xaa equals any of the naturally occurring L-amino acids
  SITE (45): Xaa equals any of the naturally occurring L-amino acids
  SITE (91): Xaa equals any of the naturally occurring L-amino acids
  SITE (255): Xaa equals any of the naturally occurring L-amino acids
  SITE (256): Xaa equals any of the naturally occurring L-amino acids
  SITE (257): Xaa equals any of the naturally occurring L-amino acids
  SITE (258): Xaa equals any of the naturally occurring L-amino acids
PLGPEKAGLAXPLVXHAARPCPSTSLQSQCSPSLXXEPXXPPRSXVISGGFDEDVKAKVENLLGISSLEKTDPVRQAPCSPPCPLLPLPFXRPWRQLFSAGLSAGRGPAPSLAATSLPLSHKSASICAALWMRCWRATGMSLAGSAPTTASGSSSTRSWFSTSSPQRSASWHSGAPSCRSWRLPCSWLSTRMPWRSGWRKTCTPACSGCKLCCRTSARCLPPRCHPPALAGTLLRTPEGRAHARGLLLEAGGALXXXXAWAIRPTWASCPLAQQCLAHTQFLRALGSPWGRD

SEQ ID NO: 1117 - protein, 235 aa, Homo sapiens
  SITE (52): Xaa equals any of the naturally occurring L-amino acids
  SITE (164): Xaa equals any of the naturally occurring L-amino acids
  SITE (209): Xaa equals any of the naturally occurring L-amino acids
  SITE (210): Xaa equals any of the naturally occurring L-amino acids
  SITE (211): Xaa equals any of the naturally occurring L-amino acids
FQEDLMKMLKRKWRTFSGFPAWKKRTLLGKHPAALPVPFFPSPSPARGDSCXQQGSPQGGGRLLPWQQHPCPCHTSQPPSAQLCGCAAGGQQVCHWLVQPLPPPAEAHPPGHGSAHPARSAQPPGTVEHPRAGAGGCPAAGFLPGCRGGVAGGKRAPQPAAAAXSAAGPQRGVCPPAATHQPWQGRCSGPLRGELMPGGSCWRLGGLCXXXWPGQYGPRGRRALWPSSVLPTLSS

SEQ ID NO: 1118 - protein, 241 aa, Homo sapiens
  SITE (151): Xaa equals any of the naturally occurring L-amino acids
  SITE (197): Xaa equals any of the naturally occurring L-amino acids
  SITE (198): Xaa equals any of the naturally occurring L-amino acids
  SITE (202): Xaa equals any of the naturally occurring L-amino acids
  SITE (203): Xaa equals any of the naturally occurring L-amino acids
  SITE (206): Xaa equals any of the naturally occurring L-amino acids
  SITE (207): Xaa equals any of the naturally occurring L-amino acids
  SITE (227): Xaa equals any of the naturally occurring L-amino acids
ALPSGVLSNVPARAGGWQRGGRHLAEVLQQSLQPLQAGVHVFLQPLLHGIRVESQLQGSLQLLHEGAPLCQEAERCGLDVLNHDRVDELPLAVVGAEPASDIPVALQQRIHRAAQMEADLCDKGKDVAAREGAGPLPAESPAENSCLHGRXKGRGRRGQGGLQGACLTGSVFSRLEIPRRFSTFALTSSSNPPEITXXRGGXXGSXXREGLHWDCRLVLGHGRAAWXTNGQANPAFSGPKG

SEQ ID NO: 1119 - protein, 29 aa, Homo sapiens
RQLFSAGLSAGRGPAPSLAATSLPLSHKS

SEQ ID NO: 1120 - protein, 28 aa, Homo sapiens
ELPLAVVGAEPASDIPVALQQRIHRAAQ

SEQ ID NO: 1121 - protein, 27 aa, Homo sapiens
QPPGTVEHPRAGAGGCPAAGFLPGCRG

SEQ ID NO: 1122 - protein, 17 aa, Homo sapiens
SVFERTNEFRDVLWSSI

SEQ ID NO: 1123 - protein, 97 aa, Homo sapiens
GVVQVTFMSSVSRVTWGCQPSICPGAPPAAALAGGLRLLFERELFGLPVSSPLICSFLEHHPRTSPPPSDCELLEGRSCVLLFIFLSPEPCTDPGMW

SEQ ID NO: 1124 - protein, 101 aa, Homo sapiens
SKQIHSFVHSFIHLFNTHLLSTYHIPGSVQGSGDRKMNRRTQLLPSRSSQSDGGGDVLGWCSKKEQIRGEETGRPNSSLSKRSLRPPARAAAGGAPGQMLG

SEQ ID NO: 1125 - protein, 28 aa, Homo sapiens
VTWGCQPSICPGAPPAAALAGGLRLLFE

SEQ ID NO: 1126 - protein, 23 aa, Homo sapiens
EQIRGEETGRPNSSLSKRSLRPP

SEQ ID NO: 1127 - protein, 130 aa, Homo sapiens
QWEHLLLLPHLLRGAHRDPGDILPLAPRSECRANSIKEYQKSIWKVYVVRLRLLKPQPNIIPTVKKIVLLAGWALFLFLAYKVSKTDREYQEYNPYEVLNLDPGATVAEIKKQYRLLSLKYHPDKGGDEV

SEQ ID NO: 1128 - protein, 65 aa, Homo sapiens
EERGGGGGAMAGQQFQYDDSGNTFFYFLTSFVGLIVIPATYYLWPRDQNAEQIRLKNIRKVYGRC

SEQ ID NO: 1129 - protein, 220 aa, Homo sapiens
RLYTGCVIFDLVSNRALSFRCMLCCNSCHSASSSLFCFSSCSLSESLSLPSSFSLWESLLVSSSSESLPLSETSSSSSFTAASFPTTPFACFCFCCFDCGNSTGVGFFFKGFFFFDLAVFLGPLLFCCHPPFVLFLLVSPCPSSAGCSSAAQMDCSFSNTSAIVCLVNLTNTVTKDPTVMLLLSSSSNTCDFISMVTYGKLPRTAITSSYFSSSRKCSRV

SEQ ID NO: 1130 - protein, 35 aa, Homo sapiens
YQKSIWKVYVVRLRLLKPQPNIIPTVKKIVLLAGW

SEQ ID NO: 1131 - protein, 35 aa, Homo sapiens
CHPPFVLFLLVSPCPSSAGCSSAAQMDCSFSNTSA

SEQ ID NO: 1132 - protein, 26 aa, Homo sapiens
GTSLDAAATAASLSPRGCRLRTPSSD

SEQ ID NO: 1133 - protein, 99 aa, Homo sapiens
QIQRHTRAPKQLIPLMTPRRSLRDHPQAQTSRQTPRPSSHLVFMRMTPSSMMNTPSGNGGCWSQLCCSSQASSSSPVASAGSCPGYAGIIAGESIRNRS

SEQ ID NO: 1134 - protein, 27 aa, Homo sapiens
PRRSLRDHPQAQTSRQTPRPSSHLVFM

SEQ ID NO: 1135 - protein, 129 aa, Homo sapiens
  SITE (50): Xaa equals any of the naturally occurring L-amino acids
THPPETGAVGRSCAVHHRHHHPHQWQVQAAVPVMPESLQVSPSETGADNXLGTRRPSPLPAHRAQPPASPRRAWPEREDTDDEAGARAAGPSLLPPPTLPAPEGYLAPWGLSLKLSPLLRQKVKHCGLC

SEQ ID NO: 1136 - protein, 36 aa, Homo sapiens
  SITE (16): Xaa equals any of the naturally occurring L-amino acids
PESLQVSPSETGADNXLGTRRPSPLPAHRAQPPASP

SEQ ID NO: 1137 - protein, 79 aa, Homo sapiens
GTAPKAPGSLQGRAGLGEVGDSDRQPWLQLHHLCLPSLARLFEGMQEAGHGELAGGLVFGCPAGCQLLFLMDSPAMIPA

SEQ ID NO: 1138 - protein, 34 aa, Homo sapiens
GEVGDSDRQPWLQLHHLCLPSLARLFEGMQEAGH

SEQ ID NO: 1139 - protein, 86 aa, Homo sapiens
GSGGLSGRLCLGMVSQRASWCHQWDELLWCSCVSLDLSLEAHPFLPVAGSGSGVVVFHQQARLGLERWAGVLCRLHLGLVSGPECP

SEQ ID NO: 1140 - protein, 41 aa, Homo sapiens
QWDELLWCSCVSLDLSLEAHPFLPVAGSGSGVVVFHQQARL

SEQ ID NO: 1141 - protein, 247 aa, Homo sapiens
MRPDWKAGAGPGGPPQKPAPSSQRKPPARPSAAAAAIAVAAAEEERRLRQRNRLRLEEDKPAVERCLEELVFGDVENDEDALLRRLRGPRVQEHEDSGDSEVENEAKGNFPPQKKPVWVDEEDEDEEMVDMMNNRFRKDMMKNASESKLSKDNLKKRLKEEFQHAMGGVPAWAETTKRKTSSDDESEEDEDDLLQRTGNFISTSTSLPRGILKMKNCQHANAERPTVARISICAVPSRCTDCDGCWD

SEQ ID NO: 1142 - protein, 180 aa, Homo sapiens
CLEELVFGDVENDEDALLRRLRGPRVQEHEDSGDSEVENEAKGNFPPQKKPVWVDEEDEDEEMVDMMNNRFRKDMMKNASESKLSKDNLKKRLKEEFQHAMGGVPAWAETTKRKTSSDDESEEDEDDLLQRTGNFISTSTSLPRGILKMKNCQHANAERPTVARISICAVPSRCTDCDGC

SEQ ID NO: 1143 - protein, 218 aa, Homo sapiens
LKEKIVRSFEVSPDGSFLLINGIAGYLHLLAMKTKELIGSMKINGRVAASTFSSDSKKVYASSGDGEVYVWDVNSRKCLNRFVDEGSLYGLSIATSRNGQYVACGSNCGVVNIYNQDSCLQETNPKPIKAIMNLVTGVTSLTFNPTTEILAIASEKMKEAVRLVHLPSCTVFSNFPVIKNKNISHVHTMDFSPRSGYFALGNEKGKALMYRLHHYSDF

SEQ ID NO: 1144 - protein, 167 aa, Homo sapiens
KINGRVAASTFSSDSKKVYASSGDGEVYVWDVNSRKCLNRFVDEGSLYGLSIATSRNGQYVACGSNCGVVNIYNQDSCLQETNPKPIKAIMNLVTGVTSLTFNPTTEILAIASEKMKEAVRLVHLPSCTVFSNFPVIKNKNISHVHTMDFSPRSGYFALGNEKGKAL

SEQ ID NO: 1145 - protein, 58 aa, Homo sapiens
WLLGLDNAVSLFQVDGKTNPKIQSIYLERFPIFKACFSANGEEVLATSTHSKVLYVYD

SEQ ID NO: 1146 - protein, 23 aa, Homo sapiens
LVFGDVENDEDALLRRLRGPRVQ

SEQ ID NO: 1147 - protein, 29 aa, Homo sapiens
KNASESKLSKDNLKKRLKEEFQHAMGGVP

SEQ ID NO: 1148 - protein, 23 aa, Homo sapiens
SLPRGILKMKNCQHANAERPTVA

SEQ ID NO: 1149 - protein, 246 aa, Homo sapiens
MRILQLILLALATGLVGGETRIIKGFECKLHSQPWQAALFEKTRLLCGATLIAPRWLLTAAHCLKPRYIVHLGQHNLQKEEGCEQTRTATESFPHPGFNNSLPNKDHRNDIMLVKMASPVSITWAVRPLTLSSRCVTAGTSCSFPAGAARPDPSYACLTPCDAPTSPSLSTRSVRTPTPATSQTPWCVPACRKGARTPARVTPGALWSVTSLFKALSPGARIRVRSPESLVSTRKSANMWTGSRRR

SEQ ID NO: 1150 - protein, 228 aa, Homo sapiens
ETRIIKGFECKLHSQPWQAALFEKTRLLCGATLIAPRWLLTAAHCLKPRYIVHLGQHNLQKEEGCEQTRTATESFPHPGFNNSLPNKDHRNDIMLVKMASPVSITWAVRPLTLSSRCVTAGTSCSFPAGAARPDPSYACLTPCDAPTSPSLSTRSVRTPTPATSQTPWCVPACRKGARTPARVTPGALWSVTSLFKALSPGARIRVRSPESLVSTRKSANMWTGSRRR

SEQ ID NO: 1151 - protein, 74 aa, Homo sapiens
CKLHSQPWQAALFEKTRLLCGATLIAPRWLLTAAHCLKPRYIVHLGQHNLQKEEGCEQTRTATESFPHPGFNNS

SEQ ID NO: 1152 - protein, 81 aa, Homo sapiens
  SITE (21): Xaa equals any of the naturally occurring L-amino acids
  SITE (22): Xaa equals any of the naturally occurring L-amino acids
VLQGRYFSPILEMRRLRPEGXXNLPGGSRAQKEPRQDLTLVLWPHCPHFAMTRSYVPTKQCMVQGSFYCIFIFKGPVQNWC

SEQ ID NO: 1153 - protein, 24 aa, Homo sapiens
CPRRRTCVRVEKSRPFQCQLHSIS

SEQ ID NO: 1154 - protein, 8 aa, Homo sapiens
PKEPGVPE

SEQ ID NO: 1155 - protein, 104 aa, Homo sapiens
LQLKPRDPFSTLGPNAVLSPQRLVLETLSKLSIQDNNVDLILATPPFSRLEKLYSTMVRFLSDRKNPVCRRWLWYCWPTWLRGTAWQLVPLQCRRAVSATSWAS

SEQ ID NO: 1156 - protein, 27 aa, Homo sapiens
RDPFSTLGPNAVLSPQRLVLETLSKLS

SEQ ID NO: 1157 - protein, 105 aa, Homo sapiens
EVISGLFIQSRRRERGQGVVGSHMILWGKSLFFFSPQRLTKNIFKNYSLLLTQRFLFPCETLLLQYVYSIRCTVQYMKGSTLYCTGLSSEQGLFTTANFLAPARL

SEQ ID NO: 1158 - protein, 23 aa, Homo sapiens
IRCTVQYMKGSTLYCTGLSSEQG

SEQ ID NO: 1159 - protein, 211 aa, Homo sapiens
  SITE (103): Xaa equals any of the naturally occurring L-amino acids
  SITE (153): Xaa equals any of the naturally occurring L-amino acids
MPIIDQVNPELHDFMQSAEVGTIFALSWLITWFGHVLSDFRHVVRLYDFFLACHPLMPIYFAAVIVLYREQEVLDCDCDMASVHHLLSQIPQDLPYETLISRXETFLFSFPHPNLLGRPLPNSKLRGRQPLLSKTLSWHQPSRGLIWCCGSGXRGLLRPEDRTKDVLTKPRTNRFVKLAVMGLTVALGAAALAVVKSALEWAPKFQLQLFP

SEQ ID NO: 1160 - protein, 70 aa, Homo sapiens
CPEFFIPATLPCPFVFAFTSEASSRAYLTQRGPGGLAQNLMPLPVGFWMGSLPPPWCWRKWVSEACSCFC

SEQ ID NO: 1161 - protein, 85 aa, Homo sapiens
  SITE (22): Xaa equals any of the naturally occurring L-amino acids
CRQAGAVRGHPMFQFTFYGVTXRFPVTRAAQAQQVAKAAASFRNPLPPTPGRWQRAHPKAHWERHKILCQAPRSPLCQVGSATGL

SEQ ID NO: 1162 - protein, 217 aa, Homo sapiens
  SITE (109): Xaa equals any of the naturally occurring L-amino acids
  SITE (159): Xaa equals any of the naturally occurring L-amino acids
HILNYLMPIIDQVNPELHDFMQSAEVGTIFALSWLITWFGHVLSDFRHVVRLYDFFLACHPLMPIYFAAVIVLYREQEVLDCDCDMASVHHLLSQIPQDLPYETLISRXETFLFSFPHPNLLGRPLPNSKLRGRQPLLSKTLSWHQPSRGLIWCCGSGXRGLLRPEDRTKDVLTKPRTNRFVKLAVMGLTVALGAAALAVVKSALEWAPKFQLQLFP

SEQ ID NO: 1163 - protein, 31 aa, Homo sapiens
AEVGTIFALSWLITWFGHVLSDFRHVVRLYD

SEQ ID NO: 1164 - protein, 33 aa, Homo sapiens
VLTKPRTNRFVKLAVMGLTVALGAAALAVVKSA

SEQ ID NO: 1165 - protein, 20 aa, Homo sapiens
GFGSVSAAGRRSGGTWQPVQ

SEQ ID NO: 1166 - protein, 16 aa, Homo sapiens
PGGLAVGSRWWSRSLT

SEQ ID NO: 1167 - protein, 30 aa, Homo sapiens
LEPSRQRRPRRRGGTSRPETDQRAKCWRQL

SEQ ID NO: 1168 - protein, 11 aa, Homo sapiens
VCLRCQNRMEN

SEQ ID NO: 1169 - protein, 367 aa, Homo sapiens
  SITE (22): Xaa equals any of the naturally occurring L-amino acids
  SITE (34): Xaa equals any of the naturally occurring L-amino acids
  SITE (102): Xaa equals any of the naturally occurring L-amino acids
MAACTARRPGRGQPLVVPVADXGPVAKAALCAAXAGAFSPASTTTTRRHLSSRNRPEGKVLETVGVFEVPKQNGKYETGQLFLHSIFGYRGVVLFPWQARLXDRDVASAAPEKAENPAGHGSKEVKGKTHTYYQVLIDARDCPHISQRSQTEAVTFLANHDDSRALYAIPGLDYVSHEDILPYTSTDQVPIQHELFERFLLYDQTKAPPFVARETLRAWQEKNHPWLELSDVHRETTENIRVTVIPFYMGMREAQNSHVYWWRYCIRLENLDSDVVQLRERHWRIFSLSGTLETVRGRGVVGREPVLSKEQPAFQYSSHVSLQASSGHMWGTFRFERPDGSHFDVRIPPFSLESNKDEKTPPSGLHW

SEQ ID NO: 1170 - protein, 33 aa, Homo sapiens
  SITE (22): Xaa equals any of the naturally occurring L-amino acids
MAACTARRPGRGQPLVVPVADXGPVAKAALCAA

SEQ ID NO: 1171 - protein, 33 aa, Homo sapiens; identical to SEQ ID NO: 1170
  SITE (22): Xaa equals any of the naturally occurring L-amino acids

SEQ ID NO: 1172 - protein, 33 aa, Homo sapiens; identical to SEQ ID NO: 1170
  SITE (22): Xaa equals any of the naturally occurring L-amino acids

SEQ ID NO: 1173 - protein, 33 aa, Homo sapiens; identical to SEQ ID NO: 1170
  SITE (22): Xaa equals any of the naturally occurring L-amino acids

SEQ ID NO: 1174 - protein, 33 aa, Homo sapiens; identical to SEQ ID NO: 1170
  SITE (22): Xaa equals any of the naturally occurring L-amino acids

SEQ ID NO: 1175 - protein, 35 aa, Homo sapiens
VLETVGVFEVPKQNGKYETGQLFLHSIFGYRGVVL

SEQ ID NO: 1176 - protein, 16 aa, Homo sapiens
GLDYVSHEDILPYTST

SEQ ID NO: 1177 - protein, 19 aa, Homo sapiens
DVHRETTENIRVTVIPFYM

SEQ ID NO: 1178 - protein, 21 aa, Homo sapiens
WWRYCIRLENLDSDVVQLRER

SEQ ID NO: 1179 - protein, 26 aa, Homo sapiens
PAFQYSSHVSLQASSGHMWGTFRFER

SEQ ID NO: 1180 - protein, 230 aa, Homo sapiens
  SITE (114): Xaa equals any of the naturally occurring L-amino acids
  SITE (182): Xaa equals any of the naturally occurring L-amino acids
  SITE (194): Xaa equals any of the naturally occurring L-amino acids
RLPSHKRRCFCLVIQKKSFKEFMLDGNLISGGVGEDVFMADIVQAWDGIEGPTVIMVSQEGHSFCLRSLRYMWAVTSINQHLIVSVSFAFHLLGAMASRVLCFFWSCRSHIPVXQSGLPGKQDDTSVAKNAMKEKLPGLIFSILFWHLKHTNCLQHFALWSVSGREVPPRRRGRRWREGSSXGRAQSGLGHRAXVSDRDHQRLPTARPPGCTGCHVPPERRPAADTEPNP

SEQ ID NO: 1181 - protein, 31 aa, Homo sapiens
KEFMLDGNLISGGVGEDVFMADIVQAWDGIE

SEQ ID NO: 1182 - protein, 29 aa, Homo sapiens
AVTSINQHLIVSVSFAFHLLGAMASRVLC

SEQ ID NO: 1183 - protein, 20 aa, Homo sapiens
TARPPGCTGCHVPPERRPAA

SEQ ID NO: 1184 - protein, 11 aa, Homo sapiens
SLCCPEGAEGC

SEQ ID NO: 1185 - protein, 12 aa, Homo sapiens
QLKKTHYDRPCP

SEQ ID NO: 1186 - protein, 12 aa, Homo sapiens
QLKKTHYDRPCP

SEQ ID NO: 1187 - protein, 29 aa, Homo sapiens
MNRPCPFCLWKVFPLLLLLHEELFPLPVP

SEQ ID NO: 1188 - protein, 33 aa, Homo sapiens
KEKTFTPRNSLCCPEGAEGCIAGGDLQLKKTHY

SEQ ID NO: 1189 - protein, 170 aa, Homo sapiens
AQRKKEMVLSEKVSQLMEWTNKRPVIRMNGDKFRRLVKAPPRNYSVIVMFTALQLHRQCVVCKQADEEFQILANSWRYSSAFTNRIFFAMVDFDEGSDVFQMLNMNSAPTFINFPAKGKPKRGDTYELQVRGFSAEQIARWIADRTDVNIRVIRPPNMAARWRFWCVSVT

SEQ ID NO: 1190 - protein, 15 aa, Homo sapiens
MVVALLIVCDVPSAS

SEQ ID NO: 1191 - protein, 16 aa, Homo sapiens
AQRKKEMVLSEKVSQL

SEQ ID NO: 1192 - protein, 17 aa, Homo sapiens
MEWTNKRPVIRMNGDKF

SEQ ID NO: 1193 - protein, 56 aa, Homo sapiens
RRLVKAPPRNYSVIVMFTALQLHRQCVVCKQADEEFQILANSWRYSSAFTNRIFFA

SEQ ID NO: 1194 - protein, 31 aa, Homo sapiens
MVDFDEGSDVFQMLNMNSAPTFINFPAKGKP

SEQ ID NO: 1195 - protein, 37 aa, Homo sapiens
KRGDTYELQVRGFSAEQIARWIADRTDVNIRVIRPPN

SEQ ID NO: 1196 - protein, 44 aa, Homo sapiens
YAGPLMLGLLLAVIGGLVYLRRVIWNFSLIKLDGLLQLCVLCLL

SEQ ID NO: 1197 - protein, 17 aa, Homo sapiens
DAVFKGFSDCLLKLGDS

SEQ ID NO: 1198 - protein, 20 aa, Homo sapiens
CQEGAKDMWDKLRKESKNLN

SEQ ID NO: 1199 - protein, 16 aa, Homo sapiens
VLLVSLSAALATWLSF

SEQ ID NO: 1200 - protein, 48 aa, Homo sapiens
MGLKLNGRYISLILAVQIAYLVQAVRAAGKCDAVFKGFSDCLLKLGDS

SEQ ID NO: 1201 - protein, 90 aa, Homo sapiens
PAAWDDKTNIKTVCTYWEDFHSCTVTALTDCQEGAKDMWDKLRKESKNLNIQGSLFELCGSGNGAAGSLLPAFPVLLVSLSAALATWLSF

SEQ ID NO: 1202 - protein, 143 aa, Homo sapiens
  SITE (49): Xaa equals any of the naturally occurring L-amino acids
  SITE (50): Xaa equals any of the naturally occurring L-amino acids
  SITE (51): Xaa equals any of the naturally occurring L-amino acids
  SITE (52): Xaa equals any of the naturally occurring L-amino acids
  SITE (53): Xaa equals any of the naturally occurring L-amino acids
MGLKLNGRYISLILAVQIAYLVQAVRAAGKCDAVFKGFSDCLLKLGDSXXXXXPAAWDDKTNIKTVCTYWEDFHSCTVTALTDCQEGAKDMWDKLRKESKNLNIQGSLFELCGSGNGAAGSLLPAFPVLLVSLSAALATWLSF

SEQ ID NO: 1203 - protein, 34 aa, Homo sapiens
MNSAAGFSHLDRRERVLKLGESFEKQPRCASTLC

SEQ ID NO: 1204 - protein, 28 aa, Homo sapiens
TIYPTEEELQAVQKIVSITERALKLVSD

SEQ ID NO: 1205 - protein, 30 aa, Homo sapiens
RALKGVLRVGVLAKGLLLRGDRNVNLVLLC

SEQ ID NO: 1206 - protein, 39 aa, Homo sapiens
ALAALRHAKWFQARANGLQSCVIIIRILRDLCQRVPTWS

SEQ ID NO: 1207 - protein, 17 aa, Homo sapiens
GDALRRVFECISSGIIL

SEQ ID NO: 1208 - protein, 16 aa, Homo sapiens
LAFRQIHKVLGMDPLP

SEQ ID NO: 1209 - protein, 342 aa, Homo sapiens
TIYPTEEELQAVQKIVSITERALKLVSDSLSEHEKNKNKEGDDKKEGGKDRALKGVLRVGVLAKGLLLRGDRNVNLVLLCSEKPSKTLLSRIAENLPKQLAVISPEKYDIKCAVSEAAIILNSCVEPKMQVTITLTSPIIREENMREGDVTSGMVKDPPDVLDRQKCLDALAALRHAKWFQARANGLQSCVIIIRILRDLCQRVPTWSDFPSWAMELLVEKAISSASSPQSPGDALRRVFECISSGIILKGSPGLLDPCEKDPFDTLATMTDQQREDITSSAQFALRLLAFRQIHKVLGMDPLPQMSQRFNIHNNRKRRRDSDGVDGFEAEGKKDKKDYDNF

SEQ ID NO: 1210 - protein, 12 aa, Homo sapiens
MERHPKKKMCSD

SEQ ID NO: 1211 - protein, 31 aa, Homo sapiens
GENSSSDFFPLFLFYFLVALASPPIFVSFIN

SEQ ID NO: 1212 - protein, 24 aa, Homo sapiens
MGSQHSAAARPSSCRRKQEDDRDG

SEQ ID NO: 1213 - protein, 30 aa, Homo sapiens
LLAEREQEEAIAQFPYVEFTGRDSITCLTC

SEQ ID NO: 1214 - protein, 34 aa, Homo sapiens
QGTGYIPTEQVNELVALIPHSDQRLRPQRTKQYV

SEQ ID NO: 1215 - protein, 55 aa, Homo sapiens
ARLNVGRESLKREMLKSQGVKVSESPMGARHSSWPEGAAFCKKVQGAQMQFPPRR

SEQ ID NO: 1216 - protein, 15 aa, Homo sapiens
ARLNVGRESLKREML

SEQ ID NO: 1217 - protein, 20 aa, Homo sapiens
LKSQGVKVSESPMGARHSSW

SEQ ID NO: 1218 - protein, 17 aa, Homo sapiens
AFCKKVQGAQMQFPPRR

SEQ ID NO: 1219 - protein, 17 aa, Homo sapiens
AFCKKVQGAQMQFPPRR

SEQ ID NO: 1220 - protein, 26 aa, Homo sapiens
NFFFVCLFKSSLRLVNSSYTPILCVL

SEQ ID NO: 1221 - protein, 37 aa, Homo sapiens
VQVLEQLTNNAVAESRFNDAAYYYWMLSMQCLDIAQD

SEQ ID NO: 1222 - protein, 34 aa, Homo sapiens
PAQKDTMLGKFYHFQRLAELYHGYHAIHRHTEDP

SEQ ID NO: 1223 - protein, 27 aa, Homo sapiens
LAKQSKALGAYRLARHAYDKLRGLYIP

SEQ ID NO: 1224 - protein, 36 aa, Homo sapiens
ARFQKSIELGTLTIRAKPFHDSEELVPLCYRCSTNN

SEQ ID NO: 1225 - protein, 73 aa, Homo sapiens
PLLNNLGNVCINCRQPFIFSASSYDVLHLVEFYLEEGITDEEAISLIDLEVLRPKRDDRQLEICKQQLPDSCG

SEQ ID NO: 1226 - protein, 29 aa, Homo sapiens
MPYAQWLAENDRFEEAQKAFHKAGRQREA

SEQ ID NO: 1227 - protein, 36 aa, Homo sapiens
FSVHRPETLFNISRFLLHSLPKDTPSGISKVKILFT

SEQ ID NO: 1228 - DNA, 1384 bp, Homo sapiens
ggcacgagcgttttccggccgtgcgtttgtggccgtccggcctccctgacatgcagccctctggaccccgaggttggaccctactgtgacacacctaccatgcggacactcttcaacctcctctggcttgccctggcctgcagccctgttcacactaccctgtcaaagtcagatgccaaaaaagccgcctcaaagacgctgctggagaagagtcagttttcagataagccggtgcaagaccggggtttggtggtgacggacctcaaagctgagagtgtggttcttgagcatcgcagctactgctcggcaaaggcccgggacagacactttgctggggatgtactgggctatgtcactccatggaacagccatggctacgatgtcaccaaggtctttgggagcaagttcacacagatctcacccgtctggctgcagctgaagagacgtggccgtgagatgtttgaggtcacgggcctccacgacgtggaccaagggtggatgcgagctgtcaggaagcatgccaagggcctgcacatagtgcctcggctcctgtttgaggactggacttacgatgatttccggaacgtcttagacagtgaggatgagatagaggagctgagcaagaccgtggtccaggtggcaaagaaccagcatttcgatggcttcgtggtggaggtctggaaccagctgctaagccagaagcgcgtgggcctcatccacatgctcacccacttggccgaggctctgcaccaggcccggctgctggccctcctggtcatcccgcctgccatcacccccgggaccgaccagctgggcatgttcacgcacaaggagtttgagcagctggcccccgtgctggatggtttcagcctcatgacctacgactactctacagcgcatcagcctggccctaatgcacccctgtcctgggttcgagcctgcgtccaggtcctggacccgaagtccaagtggcgaagcaaaatcctcctggggctcaacttctatggtacatccagacactgaaggaccacaggccccggatggtgtgggacagccaggtctcagagcacttcttcgagtacaagaagagccgcagtgggaggcacgtcgtcttctacccaaccctgaagtccctgcaggtgcggctggagctggcccgggagctgggcgttggggtctctatctgggagctgggccagggcctggactacttctacgacctgctctaggtgggcattgcggcctccgcggtggacgtgttcttttctaagccatggagtgagtgagcaggtgtgaaatacaggcctccactccgaaaaaaaaaaaaaaaaaaaaaaaaaaaaaaaaaaaaaaaaaaaaaaaaaaaaaaaaaaaaaaaaaaaaa

SEQ ID NO: 1229 - DNA, 1334 bp, Homo sapiens
  SITE (1268): n equals a,t,g, or c
gcgctggagcgttttccggccgtgcgtttgtggccgtccggcctccctgacatgcagccctctggaccccgaggttggaccctactgtgacacacctaccatgcggacactcttcaacctcctctggcttgccctggcctgcagccctgttcacactaccctgtcaaagtcagatgccaaaaaagccgcctcaaagacgctgctggagaagagtcagttttcagataagccggtgcaagaccggggtttggtggtgacggacctcaaagctgagagtgtggttcttgagcatcgcagctactgctcggcaaaggcccgggacagacactttgctggggatgtactgggctatgtcactccatggaacagccatggctacgatgtcaccaaggtctttgggagcaagttcacacagatctcacccgtctggctgcagctgaagagacgtggccgtgagatgtttgaggtcacgggcctccacgacgtggaccaagggtggatgcgagctgtcaggaagcatgccaagggcctgcacatagtgcctcggctcctgtttgaggactggacttacgatgatttccggaacgtcttagacagtgaggatgagatagaggagctgagcaagaccgtggtccaggtggcaaagaaccagcatttcgatggcttcgtggtggaggtctggaaccagctgctaagccagaagcgcgtgaccgaccagctgggcatgttcacgcacaaggagtttgagcagctggcccccgtgctggatggtttcagcctcatgacctacgactactctacagcgcatcagcctggccctaatgcacccctgtcctgggttcgagcctgcgtccaggtcctggacccgaagtccaagtggcgaagcaaaatcctcctggggctcaacttctatggtatggactacgcgacctccaaggatgcccgtgagcctgttgtcggggccaggtacatccagacactgaaggaccacaggccccggatggtgtgggacagccaggyctcagagcacttcttcgagtacaagaagagccgcagtgggaggcacgtcgtcttctacccaaccctgaagtccctgcaggtgcggctggagctggcccgggagctgggcgttggggtctctatctgggagctgggccagggcctggactacttctacgacctgctctaggtgggcattgcggcctccgcggtggacgtgttcttttctaagccatggagtgagtgagcaggtgtgaaatacaggcctncactccgttcaaaaaaaaaaaaaaaaaaaaaaaaaaaaaaaaaaaaaaaaaaaaaaaaaactcgag

SEQ ID NO: 1230 - DNA, 1112 bp, Homo sapiens
  SITE (1022): n equals a,t,g, or c
  SITE (1079): n equals a,t,g, or c
ggcgttttccggccgtgcgtttgtggccgtccggcctccctgacatgcagccctctggaccccgaggttggaccctactgtgacacacctaccatgcggacactcttcaacctcctctggcttgccctggcctgcagccctgttcacactaccctgtcaaagtcagatgccaaaaaagccgcctcaaagacgctgctggagaagagtcagttttcagataagccggtgcaagaccggggtttggtggtgacggacctcaaagctgagagtgtggttcttgagcatcgcagctactgctcggcaaaggcccgggacagacactttgctggggatgtactgggctatgtcactccatggaacagccatggctacgatgtcaccaaggtctttgggagcaagttcacacagatctcacccgtctggctgcagctgaagagacgtggccgtgagatgtttgaggtcacgggcctccacgacgtggaccaagggtggatgcgagctgtcaggaagcatgccaagggcctgcacatagtgcctcggctcctgtttgaggactggacttacgatgatttccggaacgtcttagacagtgaggatgagatagaggagctgagcaagaccgtggtccaggtggcaaagaaccagcatttcgatggcttcgtggtggaggtctggaaccagctgctaagccagaagcgcgtgggcctcatccacatgctcacccacttggccgaggctctgcaccaggcccggctgctggccctcctggtcatcccgcctgccatcacccccgggaccgaccagctgggcatgttcacgcacaaggagtttgagcagctggcccccgtgctggatggtttcagcctcatgacctacgactactctacagcgcatcagcctggccctaatgcacccctgtcctgggttcgagcctgcgtccaggtcctggacccgaartycaagtggcgaacaaaatcctcctggggstcaacttctatggwatggactamgcgacytccaanggatgcccgtkarcctgttgtcggggscaggtamatycagamactgaargaccacangccccggatggtgttggacagcaagcctcaaag

SEQ ID NO: 1231 - DNA, 2474 bp, Homo sapiens
  SITE (54): n equals a,t,g, or c
  SITE (2316): n equals a,t,g, or c
  SITE (2382): n equals a,t,g, or c
  SITE (2447): n equals a,t,g, or c
ataagagacagcgtcaggggggcggagcctatggaaaaacgccagcaacgcggnctttttacggttcctggccttttgctggccttttgctcacatgttctttcctgcgttatcccctgattctgtggataaccgtattaccgcctttgagtgagctgataccgctcgccgcagccgaacgaccgagcgcagcgagtcagtgagcgaggaagcggaagagcgcccaatacgcaaaccgcctctccccgcgcgttggccgattcattaatgcagctggcacgacaggtttcccgactggaaagcgggcagtgagcgcaacgcaattaatgtgagttagctcactcattaggcaccccaggctttacactttatgcttccggctcgtatgttgtgtggaattgtgagcggataacaatttcacacaggaaacagctatgaccatgattacgccaagctcgaaattaaccctcactaaagggaacaaaagctggagctccaccgcggtggcggccgctctagaactagtggatcccccgggctgcaggaattcggcacgaggtccggcctccctgacatgcagatttccacccagaagacagagaaggagccagtggtcatggaatgggctggggtcaaagactgggtgcctgggagctgaggcagccaccgtttcagcctggccagccctctggaccccgaggttggaccctactgtgacacacctaccatgcggacactcttcaacctcctctggcttgccctggcctgcagccctgttcacactaccctgtcaaagtcagatgccaaaaaagccgcctcaaagacgctgctggagaagagtcagttttcagataagccggtgcaagaccggggtttggtggtgacggacctcaaagctgagagtgtggttcttgagcatcgcagctactgctcggcaaaggcccgggacagacactttgctggggatgtactgggctatgtcactccatggaacagccatggctacgatgtcaccaaggtctttgggagcaagttcacacagatctcacccgtctggctgcagctgaagagacgtggccgtgagatgtttgaggtcacgggcctccacgacgtggaccaagggtggatgcgagctgtcaggaagcatgccaagggcctgcacatagtgcctcggctcctgtttgaggactggacttacgatgatttccggaacgtcttagacagtgaggatgagatagaggagctgagcaagaccgtggtccaggtggcaaagaaccagcatttcgatggcttcgtggtggaggtctggaaccagctgctaagccagaagcgcgtgggcctcatccacatgctcacccacttggccgaggctctgcaccaggcccggctgctggccctcctggtcatcccgcctgccatcacccccgggaccgaccagctgggcatgttcacgcacaaggagtttgagcagctggcccccgtgctggatggtttcagcctcatgacctacgactactctacagcgcatcagcctggccctaatgcacccctgtcctgggttcgagcctgcgtccaggtcctggacccgaagtccaagtggcgaagcaaaatcctcctggggctcaacttctatggtacatccagacactgaaggaccacaggccccggatggtgtgggacagccaggcctcagagcacttcttcgagtacaagaagagccgcagtgggaggcacgtcgtcttctacccaaccctgaagtccctgcaggtgcggctggagctggcccgggagctgggcgttggggtctctatctgggagctgggccagggcctggactacttctacgacctgctctaggtgggcattgcggcctccgcggtggacgtgttcttttctaagccatggagtgagtgagcaggtgtgaaatacaggcctccactccgttaaaaaaaaaaaaaaaaaaaaaaactcgagggggggcccggtacccaattcgccctatagtgagtcgtattacaattcactggccgtcgttttacaacgtcgtgactgggaaaaccctggcgttacccaacttaatcgccttgcagcacatccccctttcgccagctggcgtaatagcgaagaggcccgcaccgatcgcccttcccaacagttgcgcagcctgaatggcgaatggcaaattgtaagcgttaatattttgttaaaattcgcgttaaatttttgttaaatcagctcattttttaaccaataggccgaaatcggcaaaatcccttataaatcaaaagaatagaccgagatagggttgagtgttgntccagtttggaacaagagtccactattaaagaacgtggactccaacgtcaaagggcgaaaaaccgnctatcagggcgatggcccactacgtgaaccatcacccttaatcaaagttttttggggtcgaggtncccctaaaagcacttaatcgggaaccc

SEQ ID NO: 1232 - protein, 307 aa, Homo sapiens [sequence omitted]

SEQ ID NO: 1233 - protein, 363 aa, Homo sapiens; identical to SEQ ID NO: 278
  SITE (307): Xaa equals any of the naturally occurring L-amino acids

SEQ ID NO: 1234 - protein, 321 aa, Homo sapiens
  SITE (289): Xaa equals any of the naturally occurring L-amino acids
  SITE (303): Xaa equals any of the naturally occurring L-amino acids
  SITE (306): Xaa equals any of the naturally occurring L-amino acids
  SITE (308): Xaa equals any of the naturally occurring L-amino acids
  SITE (310): Xaa equals any of the naturally occurring L-amino acids
  SITE (314): Xaa equals any of the naturally occurring L-amino acids
  SITE (319): Xaa equals any of the naturally occurring L-amino acids
  SITE (321): Xaa equals any of the naturally occurring L-amino acids
MRTLFNLLWLALACSPVHTTLSKSDAKKAASKTLLEKSQFSDKPVQDRGLVVTDLKAESVVLEHRSYCSAKARDRHFAGDVLGYVTPWNSHGYDVTKVFGSKFTQISPVWLQLKRRGREMFEVTGLHDVDQGWMRAVRKHAKGLHIVPRLLFEDWTYDDFRNVLDSEDEIEELSKTVVQVAKNQHFDGFVVEVWNQLLSQKRVGLIHMLTHLAEALHQARLLALLVIPPAITPGTDQLGMFTHKEFEQLAPVLDGFSLMTYDYSTAHQPGPNAPLSWVRACVQVLDPKXKWRTKSSWGSTSMXWTXRXPXDARXPVVGXRX

SEQ ID NO: 1235 - protein, 307 aa, Homo sapiens [sequence omitted]

SEQ ID NO: 1236 - protein, 17 aa, Homo sapiens
GIVAFIVFLLLIMLIFL

SEQ ID NO: 1237 - protein, 367 aa, Homo sapiens
MGAPAASLLLLLLLFACCWAPGGANLSQDGYWQEQDLELGTLAPLDEAISSTWSSPDMLASQDSQPWTSDETVVAGGTVVLKCQVKDHEDSSLQWSNPAQQTLYFGEKRALRDNRIQLVTSTPHELSISISNVALADEGEYTCSIFTMPVRTAKSLVTVLGIPQKPIITGYKSSLREKDTATLNCQSSGSKPAARLTWRKGDQELHGEPTRIQEDPNGKTFTVSSSVTFQVTREDDGASIVCSVNHESLKGADRSTSQRIEVLYTPTAMIRPDPPHPREGQKLLLHCEGRGNPVPQQYLWEKEGSVPPLKMTQESALIFPFLNKSDSGTYGCTATSNMGSYKAYYTLNVNDPSPVPSSSSTYHAIIG

SEQ ID NO: 1238 - protein, 344 aa, Homo sapiens
NLSQDGYWQEQDLELGTLAPLDEAISSTVWSSPDMLASQDSQPWTSDETVVAGGTVVLKCQVKDHEDSSLQWSNPAQQTLYFGEKRALRDNRIQLVTSTPHELSISISNVALADEGEYTCSIFTMPVRTAKSLVTVLGIPQKPIITGYKSSLREKDTATLNCQSSGSKPAARLTWRKGDQELHGEPTRIQEDPNGKTFTVSSSVTFQVTREDDGASIVCSVNHESLKGADRSTSQRIEVLYTPTAMIRPDPPHPREGQKLLLHCEGRGNPVPQQYLWEKEGSVPPLKMTQESALIFPFLNKSDSGTYGCTATSNMGSYKAYYTLNVNDPSPVPSSSSTYHAIIG

SEQ ID NO: 1239 - protein, 24 aa, Homo sapiens
MGAPAASLLLLLLLFACCWAPGGA

SEQ ID NO: 1240 - protein, 34 aa, Homo sapiens
DGYWQEQDLELGTLAPLDEAISSTWSSPDMLASQ

SEQ ID NO: 1241 - protein, 42 aa, Homo sapiens
NLSQDGYWQEQDLELGTLAPLDEAISSTWSSPDMLASQDSQP

SEQ ID NO: 1242 - protein, 8 aa, Homo sapiens
NLSQDSQP

SEQ ID NO: 1243 - protein, 63 aa, Homo sapiens
MGAPAASLLLLLLLFACCWAPGGANLSQDDSQPWTSDETVVAGGTVVLKCQVKDHEDSSLQWS

SEQ ID NO: 1244 - DNA, 1542 bp, Homo sapiens
  SITE (1445): n equals a,t,g, or c
  SITE (1515): n equals a,t,g, or c
  SITE (1520): n equals a,t,g, or c
  SITE (1535): n equals a,t,g, or c
ggcasagccacctcggccccgggctccgaagcggctcgggggcgccctttcggtcaacatcgtagtccaccccctccccatccccagcccccggggattcaggctcgccagcgcccagccagggagccggccgggaagcgcgatgggggccccagccgcctcgctcctgctcctgctcctgctgttcgcctgctgctgggcgcccggcggggccaacctctcccaggacgacagccagccctggacatctgatgaaacagtggtggctggtggcaccgtggtgctcaagtgccaagtgaaagatcacgaggactcatccctgcaatggtcttaaccctgctcagcagactctctactttggggagaagagagcccttcgagataatcgaattcagctggttamctctacgccccacgagctcagcatcagcatcagcaatgtggccctggcagacgagggcgagtacacctgctcaatcttcactatgcctgtgcgaactgccaagtccctcgtcactgtgctaggaattccacagaagcccatcatcactggttataaatcttcattacgggaaaaagacacagccaccctaaactgtcagtcttctgggagcaagcctgcagcccggctcacctggagaaagggtgaccaagaactccacggagaaccaacccgcatacaggaagatcccaatggtaaaaccttcactgtcagcagctcggtgacattccaggttacccgggaggatgatggggcgagcatcgtgtgctctgtgaaccatgaatctctaaagggagctgacagatccacctctcaacgcattgaagttttatacacaccaactgcgatgattaggccagaccctccccatcctcgtgagggccagaagctgttgctacactgtgagggtcgcggcaatccagtcccccagcagtacctatgggagaaggagggcagtgtgccacccctgaagatgacccaggagagtgccctgatcttccctttcctcaacaagagtgacagtggcacctacggctgcacagccaccagcaacatgggcagctacaaggcctactacaccctcaatgttaatgaccccagtccggtgccctcctcctccagcacctaccacgccatcatcggtgggatcgtggctttcattgtcttcctgctgctcatcatgctcatcttccttggccactacttgatccggcacaaaggaacctacctgacacatgaggcaaaaggctccgacgatgctccagacgcggacacggccatcatcaatgcagaaggcgggcagtcaggaggggacgacaagaaggaatatttcatctagaggcgcctgcccacttcctgcgccccccagggccctgtggggacttgctggggccgtcaccaacccggacttgtacagagcaaccgcaggggccgsccctcccgnttgttccccagcccacccacccccttgttacagaatgtytkgtttggggtgcggttttgtwattggtttnggatnggggaagggaggganggcgggg

SEQ ID NO: 1245 - protein, 112 aa, Homo sapiens
PTCYSRMRALSQEITRDFNLLQVSEPSEPCVRYLPRLYLDIHNYCVLDKLRDFVASPPCWKVAQVDSLKDKARKLYTIMNSFCRRDLVFLLDDCNALEYPIPVTTVLPDRQR
